(19) United States
(12) Patent Application Publication
(10) Pub. No.: US 2025/0026838 A1
(43) Pub. Date: Jan. 23, 2025

(54) METHODS OF PREVENTING PROTEIN AGGREGATION

(71) Applicant: TrueBinding, Inc., Foster City, CA (US)

(72) Inventors: Dongxu Sun, Los Altos, CA (US); Suhail Rasool, Foster City, CA (US); Ragadeepthi Tunduguru, Foster City, CA (US); Diksha Bhatia, Mountain View, CA (US); Vishal Ramahari Mali, Fremont, CA (US); Mandakini J. Patel, San Antonio, TX (US); Yew Ann Leong, San Francisco, CA (US); Dalya Rivka Rosner, Redwood City, CA (US); Ksenya Shchors, San Mateo, CA (US); Ke Hong, Saratoga, CA (US)

(21) Appl. No.: 18/578,450

(22) PCT Filed: Jul. 13, 2022
(86) PCT No.: PCT/US2022/073694

§ 371 Date: Jan. 11, 2024

Related U.S. Application Data
(60) Provisional application No. 63/263,622, filed on Nov. 5, 2021.
(60) Provisional application No. 63/221,395, filed on Jul. 13, 2021.

(51) Int. Cl. C07K 16/28; A61P 25/28

(52) U.S. Cl. CPC C07K 16/2851; A61P 25/28; C07K 2317/565; C07K 2317/76

(57) ABSTRACT

Disclosed herein are methods and compositions for preventing or inhibiting amyloid complex formation of proteins that form pathological aggregates. Examples of these proteins include α-synuclein, tau protein, TDP-43, transthyretin, uromodulin, islet amyloid polypeptide (IAPP), serum amyloid A (SAA), p53, apolipoprotein E (APOE), APOE-4, prion protein, fibrin, or neurofilament light (NFL), CRP, SUMO, light chain, platelet-derived growth factor receptor (PDGFR), melanoma cell adhesion molecule (MCAM), complement proteins C3 and/or C9, lysozyme, insulin, native haemoglobin (Hb), glycosylated haemoglobin (HbAIC), phenylalanine (Phe), glutamine (Gln), cholesteryl (co-esteryl), cholesterol, neuroserpin, Crystallin AA and/or Crystallin AB, cystatin-C, and myostatin propeptide. These methods and compositions involve antibodies or binding fragments thereof that bind to galectin-3 (Gal3).

### CROSS-REFERENCE TO RELATED APPLICATIONS

[0001] This application claims the benefit of priority of U.S. Provisional Patent Application No. 63/221,395, filed Jul. 13, 2021, and U.S. Provisional Patent Application No. 63/263,622, filed Nov. 5, 2021, each of which is hereby expressly incorporated by reference in its entirety, including any appendices filed therewith.

### REFERENCE TO SEQUENCE LISTING

[0002] The present application is being filed along with a Sequence Listing in electronic format. The Sequence Listing is provided as a file entitled IMMUT.031WO.XML, which was created and last modified on Jul. 12, 2022, which is 2,976,441 bytes in size. The information in the electronic Sequence Listing is hereby incorporated by reference in its entirety.

### FIELD

[0003] Aspects of the present disclosure relate generally to antibodies or binding fragments thereof that bind to Galectin-3 (Gal3), and methods of using to prevent or inhibit amyloid complex formation of proteins that form pathological aggregates.

### BACKGROUND

[0004] Galectin-3 (Gal3, GAL3) is a lectin, or a carbohydrate-binding protein, with specificity towards beta-galactosides. In human cells, Gal3 is expressed and can be found in the nucleus, cytoplasm, cell surface, and in the extracellular space. Gal3 recognizes and interacts with beta-galactose conjugates on various proteins.

### SUMMARY

[0005] Galectin-3 (Gal3) has been implicated to have immunomodulatory activity. An example of this is the interaction between Gal3 and T-cell immunoglobulin and mucin-domain containing-3 (TIM-3), which causes suppression of immune responses such as T cell activation and may enable cancer cells to evade immune clearance. Antibodies that bind to Gal3 and methods of making and using them are exemplified in WO 2019/023247, WO 2020/160156, and WO 2021/113527, each of which is hereby expressly incorporated by reference in its entirety.

[0006] In some embodiments, a method of inhibiting Gal3-mediated amyloid aggregation of a protein is disclosed. In some embodiments, the method comprises: contacting the protein with an anti-Gal3 antibody or binding fragment thereof, wherein binding of the anti-Gal3 antibody or binding fragment thereof to Gal3 inhibits Gal3-mediated amyloid aggregation of the protein.

[0007] In some embodiments, a method of inhibiting Gal3-mediated oligomerization of a protein is disclosed. In some embodiments the method comprises: contacting the protein with an anti-Gal3 antibody or binding fragment thereof, wherein binding of the anti-Gal3 antibody or binding fragment thereof to Gal3 inhibits Gal3-mediated oligomerization of the protein.

[0008] In some embodiments, a method of treating an amyloid proteopathy in a subject in need thereof is disclosed. In some embodiments the method comprises: administering to the subject an anti-Gal3 antibody or binding fragment thereof, wherein binding of the anti-Gal3 antibody or binding fragment thereof to Gal3 in the subject inhibits Gal3-mediated amyloid aggregation of a protein in the subject, thereby treating the amyloid proteopathy in the subject.

[0009] In some embodiments, a method of treating a proteopathy in a subject in need thereof is disclosed. In some embodiments the method comprises: administering to the subject an anti-Gal3 antibody or binding fragment thereof, wherein binding of the anti-Gal3 antibody or binding fragment thereof to Gal3 in the subject inhibits Gal3-mediated oligomerization of a protein in the subject, thereby treating the amyloid proteopathy in the subject.

[0010] In some embodiments, a method of promoting amyloid aggregation and/or oligomerization of a protein is disclosed. In some embodiments, the method comprises contacting the protein with Gal3, wherein Gal3 promotes amyloid aggregation and/or oligomerization of the protein.

[0011] In some embodiments, a composition comprising a protein and Gal3, wherein Gal3 promotes amyloid aggregation and/or oligomerization of the protein is disclosed.

[0012] In some embodiments, a method of inhibiting Gal3-mediated amyloid aggregation of amyloid β40 and/or amyloid β42 is disclosed. In some embodiments, the method comprises: contacting the protein with an anti-Gal3 antibody or binding fragment thereof, wherein binding of the anti-Gal3 antibody or binding fragment thereof to Gal3 inhibits Gal3-mediated amyloid aggregation of amyloid β40 and/or amyloid β42.

[0013] In some embodiments, a method of treating Alzheimer's disease in a subject in need thereof is disclosed. In some embodiments, the method comprises: administering to the subject an anti-Gal3 antibody or binding fragment thereof, wherein binding of the anti-Gal3 antibody or binding fragment thereof to Gal3 in the subject inhibits Gal3-mediated amyloid aggregation of amyloid β40 and/or amyloid β42 in the subject, thereby treating Alzheimer's disease in the subject.

[0014] In some embodiments, a method of treating CAA in a subject in need thereof is disclosed. In some embodiments the method comprises: administering to the subject an anti-Gal3 antibody or binding fragment thereof, wherein binding of the anti-Gal3 antibody or binding fragment thereof to Gal3 in the subject inhibits Gal3-mediated aggregation of amyloid β40 and/or amyloid β42 in the subject, thereby treating CAA in the subject.

[0015] In some embodiments, a method of inhibiting Gal3-mediated amyloid aggregation of phospho tau is disclosed. In some embodiments the method comprises: contacting the protein with an anti-Gal3 antibody or binding fragment thereof, wherein binding of the anti-Gal3 antibody or binding fragment thereof to Gal3 inhibits Gal3-mediated oligomerization of phospho tau.

[0016] In some embodiments, a method of treating Alzheimer's disease in a subject in need thereof is disclosed. In some embodiments the method comprises: administering to the subject an anti-Gal3 antibody or binding fragment thereof, wherein binding of the anti-Gal3 antibody or binding fragment thereof to Gal3 in the subject inhibits Gal3-mediated oligomerization of phospho tau in the subject, thereby treating Alzheimer's disease in the subject.

[0017] In some embodiments, a method of treating tauopathies in a subject in need thereof is disclosed. In some embodiments the method comprises: administering to the subject an anti-Gal3 antibody or binding fragment thereof, wherein binding of the anti-Gal3 antibody or binding fragment thereof to Gal3 in the subject inhibits Gal3-mediated oligomerization of phospho tau in the subject, thereby treating the tauopathy in the subject.

[0018] In some embodiments, a method of inhibiting Gal3-mediated oligomerization of alpha synuclein is disclosed. In some embodiments the method comprises: contacting the protein with an anti-Gal3 antibody or binding fragment thereof, wherein binding of the anti-Gal3 antibody or binding fragment thereof to Gal3 inhibits Gal3-mediated oligomerization of alpha synuclein.

[0019] In some embodiments, a method of treating Lewy body disease in a subject in need thereof is disclosed. In some embodiments the method comprises: administering to the subject an anti-Gal3 antibody or binding fragment thereof, wherein binding of the anti-Gal3 antibody or binding fragment thereof to Gal3 in the subject inhibits Gal3-mediated oligomerization of alpha synuclein in the subject, thereby treating Lewy body disease in the subject.

[0020] In some embodiments, a method of treating multiple system atrophy in a subject in need thereof is disclosed. In some embodiments the method comprises: administering to the subject an anti-Gal3 antibody or binding fragment thereof, wherein binding of the anti-Gal3 antibody or binding fragment thereof to Gal3 in the subject inhibits Gal3-mediated oligomerization of alpha synuclein in the subject, thereby treating multiple system atrophy in the subject.

[0021] In some embodiments, a method of inhibiting Gal3-mediated oligomerization of APOE-4 is disclosed. In some embodiments the method comprises: contacting the protein with an anti-Gal3 antibody or binding fragment thereof, wherein binding of the anti-Gal3 antibody or binding fragment thereof to Gal3 inhibits Gal3-mediated oligomerization of APOE-4.

[0022] In some embodiments, a method of treating Alzheimer's disease in a subject in need thereof is disclosed. In some embodiments the method comprises: administering to the subject an anti-Gal3 antibody or binding fragment thereof, wherein binding of the anti-Gal3 antibody or binding fragment thereof to Gal3 in the subject inhibits Gal3-mediated oligomerization of APOE-4 in the subject, thereby treating Alzheimer's disease in the subject.

[0023] In some embodiments, a method of treating CAA in a subject in need thereof is disclosed. In some embodiments the method comprises:administering to the subject an anti-Gal3 antibody or binding fragment thereof, wherein binding of the anti-Gal3 antibody or binding fragment thereof to Gal3 in the subject inhibits Gal3-mediated oligomerization of alpha synuclein in the subject, thereby treating CAA in the subject.

[0024] In some embodiments, a method of inhibiting Gal3-mediated oligomerization of cholesterol is disclosed. In some embodiments the method comprises: contacting the protein with an anti-Gal3 antibody or binding fragment thereof, wherein binding of the anti-Gal3 antibody or binding fragment thereof to Gal3 inhibits Gal3-mediated oligomerization of cholesterol.

[0025] In some embodiments, a method of treating Alzheimer's disease in a subject in need thereof is disclosed. In some embodiments the method comprises: administering to the subject an anti-Gal3 antibody or binding fragment thereof, wherein binding of the anti-Gal3 antibody or binding fragment thereof to Gal3 in the subject inhibits Gal3-mediated oligomerization of cholesterol in the subject, thereby treating Alzheimer's disease in the subject.

[0026] In some embodiments, a method of treating cardiovascular disease in a subject in need thereof is disclosed. In some embodiments the method comprises: administering to the subject an anti-Gal3 antibody or binding fragment thereof, wherein binding of the anti-Gal3 antibody or binding fragment thereof to Gal3 in the subject inhibits Gal3-mediated oligomerization of cholesterol in the subject, thereby treating cardiovascular disease in the subject.

[0027] In some embodiments, a method of treating atherosclerosis disease in a subject in need thereof is disclosed. In some embodiments the method comprises: administering to the subject an anti-Gal3 antibody or binding fragment thereof, wherein binding of the anti-Gal3 antibody or binding fragment thereof to Gal3 in the subject inhibits Gal3-mediated oligomerization of cholesterol in the subject, thereby treating atherosclerosis in the subject.

[0028] In some embodiments, a method of inhibiting Gal3-mediated oligomerization of cholesteryl is disclosed. In some embodiments the method comprises: contacting the protein with an anti-Gal3 antibody or binding fragment thereof, wherein binding of the anti-Gal3 antibody or binding fragment thereof to Gal3 inhibits Gal3-mediated oligomerization of cholesteryl.

[0029] In some embodiments, a method of treating Alzheimer's disease in a subject in need thereof is disclosed. In some embodiments the method comprises: administering to the subject an anti-Gal3 antibody or binding fragment thereof, wherein binding of the anti-Gal3 antibody or binding fragment thereof to Gal3 in the subject inhibits Gal3-mediated oligomerization of cholesteryl in the subject, thereby treating Alzheimer's disease in the subject.

[0030] In some embodiments, a method of treating cardiovascular disease in a subject in need thereof is disclosed. In some embodiments the method comprises: administering to the subject an anti-Gal3 antibody or binding fragment thereof, wherein binding of the anti-Gal3 antibody or binding fragment thereof to Gal3 in the subject inhibits Gal3-mediated oligomerization of cholesteryl in the subject, thereby treating cardiovascular disease in the subject.

[0031] In some embodiments, a method of treating atherosclerosis disease in a subject in need thereof is disclosed. In some embodiments the method comprises: administering to the subject an anti-Gal3 antibody or binding fragment thereof, wherein binding of the anti-Gal3 antibody or binding fragment thereof to Gal3 in the subject inhibits Gal3-mediated oligomerization of cholesteryl in the subject, thereby treating atherosclerosis in the subject.

[0032] In some embodiments, a method of inhibiting Gal3-mediated oligomerization of neuroserpin is disclosed. In some embodiments the method comprises: contacting the protein with an anti-Gal3 antibody or binding fragment thereof, wherein binding of the anti-Gal3 antibody or binding fragment thereof to Gal3 inhibits Gal3-mediated oligomerization of neuroserpin.

[0033] In some embodiments, a method of treating familial encephalopathy with neuroserpin inclusion bodies (FENIB) in a subject in need thereof is disclosed. In some embodiments the method comprises: administering to the subject an anti-Gal3 antibody or binding fragment thereof, wherein binding of the anti-Gal3 antibody or binding fragment thereof to Gal3 in the subject inhibits Gal3-mediated oligomerization of neuroserpin in the subject, thereby treating familial encephalopathy with neuroserpin inclusion bodies (FENIB) in the subject.

[0034] In some embodiments, a method of inhibiting Gal3-mediated oligomerization of insulin is disclosed. In some embodiments the method comprises: contacting the protein with an anti-Gal3 antibody or binding fragment thereof, wherein binding of the anti-Gal3 antibody or binding fragment thereof to Gal3 inhibits Gal3-mediated oligomerization of insulin.

[0035] In some embodiments, a method of treating insulin-derived amyloidosis in a subject in need thereof is disclosed. In some embodiments the method comprises: administering to the subject an anti-Gal3 antibody or binding fragment thereof, wherein binding of the anti-Gal3 antibody or binding fragment thereof to Gal3 in the subject inhibits Gal3-mediated oligomerization of insulin in the subject, thereby treating insulin-derived amyloidosis in the subject.

[0036] In some embodiments, a method of treating diabetes in a subject in need thereof is disclosed. In some embodiments the method comprises: administering to the subject an anti-Gal3 antibody or binding fragment thereof, wherein binding of the anti-Gal3 antibody or binding fragment thereof to Gal3 in the subject inhibits Gal3-mediated oligomerization of insulin in the subject, thereby treating diabetes in the subject.

[0037] In some embodiments, a method of inhibiting Gal3-mediated oligomerization of cystatin-c is disclosed. In some embodiments the method comprises: contacting the protein with an anti-Gal3 antibody or binding fragment thereof, wherein binding of the anti-Gal3 antibody or binding fragment thereof to Gal3 inhibits Gal3-mediated oligomerization of cystatin-c.

[0038] In some embodiments, a method of treating Alzheimer's disease in a subject in need thereof is disclosed. In some embodiments the method comprises: administering to the subject an anti-Gal3 antibody or binding fragment thereof, wherein binding of the anti-Gal3 antibody or binding fragment thereof to Gal3 in the subject inhibits Gal3-mediated oligomerization of cystatin-c in the subject, thereby treating Alzheimer's disease in the subject.

[0039] In some embodiments, a method of treating CAA in a subject in need thereof is disclosed. In some embodiments the method comprises: administering to the subject an anti-Gal3 antibody or binding fragment thereof, wherein binding of the anti-Gal3 antibody or binding fragment thereof to Gal3 in the subject inhibits Gal3-mediated oligomerization of cystatin-c in the subject, thereby treating CAA in the subject.

[0040] In some embodiments, a method of treating kidney disease in a subject in need thereof is disclosed. In some embodiments the method comprises: administering to the subject an anti-Gal3 antibody or binding fragment thereof, wherein binding of the anti-Gal3 antibody or binding fragment thereof to Gal3 in the subject inhibits Gal3-mediated oligomerization of cystatin-c in the subject, thereby treating kidney disease in the subject.

[0041] In some embodiments, a method of inhibiting Gal3-mediated oligomerization of prion protein is disclosed. In some embodiments the method comprises: contacting the protein with an anti-Gal3 antibody or binding fragment thereof, wherein binding of the anti-Gal3 antibody or binding fragment thereof to Gal3 inhibits Gal3-mediated oligomerization of prion protein.

[0042] In some embodiments, a method of treating prion disease in a subject in need thereof is disclosed. In some embodiments the method comprises: administering to the subject an anti-Gal3 antibody or binding fragment thereof, wherein binding of the anti-Gal3 antibody or binding fragment thereof to Gal3 in the subject inhibits Gal3-mediated oligomerization of prion protein in the subject, thereby treating prion disease in the subject.

[0043] In some embodiments, a method of treating transmissible spongiform encephalopathy (TSE) in a subject in need thereof is disclosed. In some embodiments the method comprises: administering to the subject an anti-Gal3 antibody or binding fragment thereof, wherein binding of the anti-Gal3 antibody or binding fragment thereof to Gal3 in the subject inhibits Gal3-mediated oligomerization of prion protein in the subject, thereby treating transmissible spongiform encephalopathy (TSE) in the subject.

[0044] In some embodiments, a method of treating familial Creutzfeldt-Jakob disease (CJD) in a subject in need thereof is disclosed. In some embodiments the method comprises: administering to the subject an anti-Gal3 antibody or binding fragment thereof, wherein binding of the anti-Gal3 antibody or binding fragment thereof to Gal3 in the subject inhibits Gal3-mediated oligomerization of prion protein in the subject, thereby treating familial Creutzfeldt-Jakob disease (CJD) in the subject.

[0045] In some embodiments, a method of treating fatal familial insomnia in a subject in need thereof is disclosed. In some embodiments the method comprises: administering to the subject an anti-Gal3 antibody or binding fragment thereof, wherein binding of the anti-Gal3 antibody or binding fragment thereof to Gal3 in the subject inhibits Gal3-mediated oligomerization of prion protein in the subject, thereby treating fatal familial insomnia in the subject.

[0046] In some embodiments, a method of treating Gerstmann-Straussler-Scheinker disease in a subject in need thereof is disclosed. In some embodiments the method comprises: administering to the subject an anti-Gal3 antibody or binding fragment thereof, wherein binding of the anti-Gal3 antibody or binding fragment thereof to Gal3 in the subject inhibits Gal3-mediated oligomerization of prion protein in the subject, thereby treating Gerstmann-Straussler-Scheinker disease in the subject.

[0047] In some embodiments, a method of inhibiting Gal3-mediated oligomerization of myostatin is disclosed. In some embodiments the method comprises: contacting the protein with an anti-Gal3 antibody or binding fragment thereof, wherein binding of the anti-Gal3 antibody or binding fragment thereof to Gal3 inhibits Gal3-mediated oligomerization of myostatin.

[0048] In some embodiments, a method of treating idiopathic inflammatory myopathies (IIM) in a subject in need thereof is disclosed. In some embodiments the method comprises: administering to the subject an anti-Gal3 antibody or binding fragment thereof, wherein binding of the anti-Gal3 antibody or binding fragment thereof to Gal3 in the subject inhibits Gal3-mediated oligomerization of myostatin in the subject, thereby treating idiopathic inflammatory myopathies (IIM) in the subject.

[0049] In some embodiments, a method of inhibiting Gal3-mediated oligomerization of transthyretin is disclosed. In some embodiments the method comprises: contacting the protein with an anti-Gal3 antibody or binding fragment thereof, wherein binding of the anti-Gal3 antibody or binding fragment thereof to Gal3 inhibits Gal3-mediated oligomerization of transthyretin.

[0050] In some embodiments, a method of treating transthyretin amyloidosis in a subject in need thereof is disclosed. In some embodiments the method comprises: administering to the subject an anti-Gal3 antibody or binding fragment thereof, wherein binding of the anti-Gal3 antibody or binding fragment thereof to Gal3 in the subject inhibits Gal3-mediated oligomerization of transthyretin in the subject, thereby treating transthyretin amyloidosis in the subject.

[0051] In some embodiments, a method of treating heart and/or kidney disease in a subject in need thereof is disclosed. In some embodiments the method comprises: administering to the subject an anti-Gal3 antibody or binding fragment thereof, wherein binding of the anti-Gal3 antibody or binding fragment thereof to Gal3 in the subject inhibits Gal3-mediated oligomerization of transthyretin in the subject, thereby treating heart and/or kidney disease in the subject.

[0052] In some embodiments, a method of treating preeclampsia in a subject in need thereof is disclosed. In some embodiments the method comprises: administering to the subject an anti-Gal3 antibody or binding fragment thereof, wherein binding of the anti-Gal3 antibody or binding fragment thereof to Gal3 in the subject inhibits Gal3-mediated oligomerization of transthyretin in the subject, thereby treating preeclampsia in the subject.

[0053] In some embodiments, a method of inhibiting Gal3-mediated oligomerization of phenylalanine is disclosed. In some embodiments the method comprises: contacting the protein with an anti-Gal3 antibody or binding fragment thereof, wherein binding of the anti-Gal3 antibody or binding fragment thereof to Gal3 inhibits Gal3-mediated oligomerization of phenylalanine.

[0054] In some embodiments, a method of treating phenylketonuria in a subject in need thereof is disclosed. In some embodiments the method comprises: administering to the subject an anti-Gal3 antibody or binding fragment thereof, wherein binding of the anti-Gal3 antibody or binding fragment thereof to Gal3 in the subject inhibits Gal3-mediated oligomerization of phenylalanine in the subject, thereby treating phenylketonuria in the subject.

[0055] In some embodiments, a method of inhibiting Gal3-mediated oligomerization of glutamine is disclosed. In some embodiments the method comprises: contacting the protein with an anti-Gal3 antibody or binding fragment thereof, wherein binding of the anti-Gal3 antibody or binding fragment thereof to Gal3 inhibits Gal3-mediated oligomerization of glutamine.

[0056] In some embodiments, a method of treating Huntington Disease in a subject in need thereof is disclosed. In some embodiments the method comprises: administering to the subject an anti-Gal3 antibody or binding fragment thereof, wherein binding of the anti-Gal3 antibody or binding fragment thereof to Gal3 in the subject inhibits Gal3-mediated oligomerization of glutamine in the subject, thereby treating Huntington Disease in the subject.

[0057] In some embodiments, a method of inhibiting Gal3-mediated oligomerization of Neurofibrillary Light chain (NFL) is disclosed. In some embodiments the method comprises: contacting the protein with an anti-Gal3 antibody or binding fragment thereof, wherein binding of the anti-Gal3 antibody or binding fragment thereof to Gal3 inhibits Gal3-mediated oligomerization of NFL.

[0058] In some embodiments, a method of treating motor neuron degeneration in a subject in need thereof is disclosed. In some embodiments the method comprises: administering to the subject an anti-Gal3 antibody or binding fragment thereof, wherein binding of the anti-Gal3 antibody or binding fragment thereof to Gal3 in the subject inhibits Gal3-mediated oligomerization of NFL in the subject, thereby treating motor neuron degeneration in the subject.

[0059] In some embodiments, a method of inhibiting Gal3-mediated amyloid aggregation of fibrin is disclosed. In some embodiments the method comprises: contacting the protein with an anti-Gal3 antibody or binding fragment thereof, wherein binding of the anti-Gal3 antibody or binding fragment thereof to Gal3 inhibits Gal3-mediated oligomerization of fibrin.

[0060] In some embodiments, a method of treating cerebrovascular damage in a subject in need thereof is disclosed. In some embodiments the method comprises: administering to the subject an anti-Gal3 antibody or binding fragment thereof, wherein binding of the anti-Gal3 antibody or binding fragment thereof to Gal3 in the subject inhibits Gal3-mediated oligomerization of fibrin in the subject, thereby treating cerebrovascular damage in the subject.

[0061] In some embodiments, a method of treating stroke in a subject in need thereof is disclosed. In some embodiments the method comprises: administering to the subject an anti-Gal3 antibody or binding fragment thereof, wherein binding of the anti-Gal3 antibody or binding fragment thereof to Gal3 in the subject inhibits Gal3-mediated oligomerization of fibrin in the subject, thereby treating stroke in the subject.

[0062] In some embodiments, a method of treating CAA in a subject in need thereof is disclosed. In some embodiments the method comprises: administering to the subject an anti-Gal3 antibody or binding fragment thereof, wherein binding of the anti-Gal3 antibody or binding fragment thereof to Gal3 in the subject inhibits Gal3-mediated oligomerization of fibrin in the subject, thereby treating CAA in the subject.

[0063] In some embodiments, a method of treating Alzheimer's disease in a subject in need thereof is disclosed. In some embodiments the method comprises: administering to the subject an anti-Gal3 antibody or binding fragment thereof, wherein binding of the anti-Gal3 antibody or binding fragment thereof to Gal3 in the subject inhibits Gal3-mediated oligomerization of fibrin in the subject, thereby treating Alzheimer's disease in the subject.

[0064] In some embodiments, a method of inhibiting Gal3-mediated oligomerization of lysozyme is disclosed. In some embodiments the method comprises: contacting the protein with an anti-Gal3 antibody or binding fragment thereof, wherein binding of the anti-Gal3 antibody or binding fragment thereof to Gal3 inhibits Gal3-mediated oligomerization of lysozyme.

[0065] In some embodiments, a method of treating human systemic amyloid disease in a subject in need thereof is disclosed. In some embodiments the method comprises: administering to the subject an anti-Gal3 antibody or binding fragment thereof, wherein binding of the anti-Gal3 antibody or binding fragment thereof to Gal3 in the subject inhibits Gal3-mediated oligomerization of lysozyme in the subject, thereby treating human systemic amyloid disease in the subject.

[0066] In some embodiments, a method of inhibiting Gal3-mediated amyloid aggregation of complement proteins C3 and/or C9 is disclosed. In some embodiments the method comprises: contacting the protein with an anti-Gal3 antibody or binding fragment thereof, wherein binding of the anti-Gal3 antibody or binding fragment thereof to Gal3 inhibits Gal3-mediated oligomerization of complement proteins C3 and/or C9.

[0067] In some embodiments, a method of treating disruption in innate immune system in a subject in need thereof is disclosed. In some embodiments the method comprises: administering to the subject an anti-Gal3 antibody or binding fragment thereof, wherein binding of the anti-Gal3 antibody or binding fragment thereof to Gal3 in the subject inhibits Gal3-mediated oligomerization of complement proteins C3 and/or C9 in the subject, thereby treating disruption in innate immune system in the subject.

[0068] In some embodiments, a method of inhibiting Gal3-mediated oligomerization of crystallins is disclosed. In some embodiments the method comprises: contacting the protein with an anti-Gal3 antibody or binding fragment thereof, wherein binding of the anti-Gal3 antibody or binding fragment thereof to Gal3 inhibits Gal3-mediated oligomerization of crystallins.

[0069] In some embodiments, a method of treating damage to lens of a subject's eye and/or blurring of vision in a subject in need thereof is disclosed. In some embodiments the method comprises: administering to the subject an anti-Gal3 antibody or binding fragment thereof, wherein binding of the anti-Gal3 antibody or binding fragment thereof to Gal3 in the subject inhibits Gal3-mediated oligomerization of crystallins in the subject, thereby treating damage to lenses of the subject's eye and/or blurring of vision in the subject.

[0070] In some embodiments, a method of inhibiting Gal3-mediated oligomerization of atrial natriuretic peptide (ANP) is disclosed. In some embodiments the method comprises: contacting the protein with an anti-Gal3 antibody or binding fragment thereof, wherein binding of the anti-Gal3 antibody or binding fragment thereof to Gal3 inhibits Gal3-mediated oligomerization of ANP.

[0071] In some embodiments, a method of treating congestive heart failure (CHF) in a subject in need thereof is disclosed. In some embodiments the method comprises: administering to the subject an anti-Gal3 antibody or binding fragment thereof, wherein binding of the anti-Gal3 antibody or binding fragment thereof to Gal3 in the subject inhibits Gal3-mediated oligomerization of ANP in the subject, thereby treating CHF in the subject.

[0072] In some embodiments, a method of treating cardiac amyloidosis in a subject in need thereof is disclosed. In some embodiments the method comprises: administering to the subject an anti-Gal3 antibody or binding fragment thereof, wherein binding of the anti-Gal3 antibody or binding fragment thereof to Gal3 in the subject inhibits Gal3-mediated oligomerization of ANP in the subject, thereby treating cardiac amyloidosis in the subject.

[0073] In some embodiments, a method of inhibiting Gal3-mediated oligomerization of B-Type Natriuretic Peptide (BNP) is disclosed. In some embodiments the method comprises: contacting the protein with an anti-Gal3 antibody or binding fragment thereof, wherein binding of the anti-Gal3 antibody or binding fragment thereof to Gal3 inhibits Gal3-mediated oligomerization of BNP.

[0074] In some embodiments, a method of treating congestive heart failure (CHF) in a subject in need thereof is disclosed. In some embodiments the method comprises: administering to the subject an anti-Gal3 antibody or binding fragment thereof, wherein binding of the anti-Gal3 antibody or binding fragment thereof to Gal3 in the subject inhibits Gal3-mediated oligomerization of BNP in the subject, thereby treating CHF in the subject.

[0075] In some embodiments, a method of treating cardiac amyloidosis in a subject in need thereof is disclosed. In some embodiments the method comprises: administering to the subject an anti-Gal3 antibody or binding fragment thereof, wherein binding of the anti-Gal3 antibody or binding fragment thereof to Gal3 in the subject inhibits Gal3-mediated oligomerization of BNP in the subject, thereby treating cardiac amyloidosis in the subject.

[0076] In some embodiments, a method of inhibiting Gal3-mediated oligomerization calcitonin is disclosed. In some embodiments the method comprises: contacting the protein with an anti-Gal3 antibody or binding fragment thereof, wherein binding of the anti-Gal3 antibody or binding fragment thereof to Gal3 inhibits Gal3-mediated amyloid aggregation of calcitonin.

[0077] In some embodiments, a method of treating medullary carcinoma of the thyroid (MTC) in a subject in need thereof is disclosed. In some embodiments the method comprises: administering to the subject an anti-Gal3 antibody or binding fragment thereof, wherein binding of the anti-Gal3 antibody or binding fragment thereof to Gal3 in the subject inhibits Gal3-mediated oligomerization of calcitonin in the subject, thereby treating MTC in the subject.

[0078] In some embodiments, a method of treating osteoporosis in a subject in need thereof is disclosed. In some embodiments the method comprises: administering to the subject an anti-Gal3 antibody or binding fragment thereof, wherein binding of the anti-Gal3 antibody or binding fragment thereof to Gal3 in the subject inhibits Gal3-mediated oligomerization of calcitonin in the subject, thereby treating osteoporosis in the subject.

[0079] In some embodiments, a method of treating Paget's Disease in a subject in need thereof is disclosed. In some embodiments the method comprises: administering to the subject an anti-Gal3 antibody or binding fragment thereof, wherein binding of the anti-Gal3 antibody or binding fragment thereof to Gal3 in the subject inhibits Gal3-mediated oligomerization of calcitonin in the subject, thereby treating Paget's Disease in the subject.

[0080] In some embodiments, a method of inhibiting Gal3-mediated oligomerization of Serum Amyloid (A) (SAA) is disclosed. In some embodiments the method comprises: contacting the protein with an anti-Gal3 antibody or binding fragment thereof, wherein binding of the anti-Gal3 antibody or binding fragment thereof to Gal3 inhibits Gal3-mediated oligomerization of Serum Amyloid (A) (SAA).

[0081] In some embodiments, a method of treating peripheral amyloidosis in a subject in need thereof is disclosed. In some embodiments the method comprises: administering to the subject an anti-Gal3 antibody or binding fragment thereof, wherein binding of the anti-Gal3 antibody or binding fragment thereof to Gal3 in the subject inhibits Gal3-mediated oligomerization of Serum Amyloid (A) (SAA) in the subject, thereby treating peripheral amyloidosis in the subject.

[0082] In some embodiments, a method of inhibiting Gal3-mediated amyloid aggregation of islet amyloid polypeptide (IAPP) is disclosed. In some embodiments the method comprises: contacting the protein with an anti-Gal3 antibody or binding fragment thereof, wherein binding of the anti-Gal3 antibody or binding fragment thereof to Gal3 inhibits Gal3-mediated oligomerization of IAPP.

[0083] In some embodiments, a method of treating type 2 diabetes in a subject in need thereof is disclosed. In some embodiments the method comprises: administering to the subject an anti-Gal3 antibody or binding fragment thereof, wherein binding of the anti-Gal3 antibody or binding fragment thereof to Gal3 in the subject inhibits Gal3-mediated oligomerization of IAPP in the subject, thereby treating type 2 diabetes in the subject.

[0084] In some embodiments, a method of inhibiting Gal3-mediated amyloid aggregation of TAR DNA binding protein 43 (TDP-43) is disclosed. In some embodiments the method comprises: contacting the protein with an anti-Gal3 antibody or binding fragment thereof, wherein binding of the anti-Gal3 antibody or binding fragment thereof to Gal3 inhibits Gal3-mediated oligomerization of TDP-43.

[0085] In some embodiments, a method of treating amyotrophic lateral sclerosis (ALS) in a subject in need thereof is disclosed. In some embodiments the method comprises: administering to the subject an anti-Gal3 antibody or binding fragment thereof, wherein binding of the anti-Gal3 antibody or binding fragment thereof to Gal3 in the subject inhibits Gal3-mediated oligomerization of TDP-43 in the subject, thereby treating ALS in the subject.

[0086] In some embodiments, a method of treating frontotemporal lobar degeneration (FTLD) in a subject in need thereof is disclosed. In some embodiments the method comprises: administering to the subject an anti-Gal3 antibody or binding fragment thereof, wherein binding of the anti-Gal3 antibody or binding fragment thereof to Gal3 in the subject inhibits Gal3-mediated oligomerization of TDP-43 in the subject, thereby treating FTLD in the subject.

[0087] In some embodiments, a method of inhibiting Gal3-mediated oligomerization is disclosed. In some embodiments, the method comprises: contacting one or more monomers with an anti-Gal3 antibody or binding fragment thereof, wherein binding of the anti-Gal3 antibody or binding fragment thereof to Gal3 inhibits Gal3-mediated oligomerization of the pone or more monomers.

### BRIEF DESCRIPTION OF THE DRAWINGS

[0088] In addition to the features described above, additional features and variations will be readily apparent from the following descriptions of the drawings and exemplary embodiments. It is to be understood that these drawings depict typical embodiments and are not intended to be limiting in scope.

[0089] FIG. 1 is a flow chart depicting embodiments of a method of inhibiting Gal3-mediated protein aggregation.

[0090] FIG. 2 is a flow chart depicting embodiments of a method of promoting Gal3-mediated protein aggregation.

[0091] FIG. 3 is a flow chart depicting embodiments of a method of treating amyloid proteopathy in a subject.

[0092] FIG. 4A-C depict promotion of aggregation of α-synuclein by Gal3. FIG. 4A shows a Western blot of α-synuclein incubated with or without Gal3 over 0-5 hours. FIG. 4B shows quantification of α-synuclein aggregation with Gal3 over the 0-5 hour time points. FIG. 4C shows dot blots showing oligomerization of α-synuclein when incubated with Gal3.

[0093] FIG. 5A-F depict promotion of aggregation of Tau protein by Gal3. FIG. 5A shows a Western blot of Tau protein incubated with or without Gal3 at 0 and 5 hour time points. FIG. 5B shows quantification of Tau protein dimerization and trimerization with or without incubation with or without Gal3 at 0 and 5 hour time points. FIG. 5C shows dot blots showing that non-phosphorylated Tau oligomerizes very lightly when mixed with Gal3. FIG. 5D shows dot blots showing that phosphorylated Tau (phospho-tau (S396)) is dramatically oligomerized when mixed with Gal3. FIG. 5E and FIG. 5F shows time course aggregation of 4RTau (FIG. 5E) and Phospho Tau (FIG. 5F) (0.1 mg/mL) incubated with 100 μg of rhGalectin-3 probed with A11, Total Tau (Tau 5), PhosTau (Ser396) and Galectin-3 (804)Ab.

[0094] FIG. 6 depicts a dot blot of TDP-43 aggregation incubated with or without Gal3 as detected with antibody A11, anti-TDP-43 antibody, and anti-Gal3 antibody.

[0095] FIG. 7A-C depict promotion of aggregation of TDP-43 by Gal3. FIG. 7A shows a Western blot of TDP-43 incubated with or without Gal3 over 0-5 hours detected with anti-Gal3 antibody. FIG. 7B shows a Western blot of TDP-43 incubated with or without Gal3 over 0-5 hours detected with anti-TDP-43 antibody, showing multimerization of TDP-43. FIG. 7C depicts quantification of TDP-43 aggregation with or without Gal3 over the 0-5 hour time points.

[0096] FIG. 8A-D depicts promotion of TTR aggregation by Gal3. FIG. 8A shows a Western blot of TTR incubated with or without Gal3 over 0-24 hours detected with anti-TTR antibody. FIG. 8B depicts quantification of TTR aggregation with or without Gal3 over the 0-24 hour time points. FIG. 8C shows a Western blot of TTR incubated with or without Gal3 over 1-6 day time points. FIG. 8D depicts quantification of TTR aggregation with or without Gal3 over the 1-6 day time points.

[0097] FIG. 9A-D depicts promotion of IAPP aggregation by Gal3. FIG. 9A depicts a Western blot of IAPP alone, IAPP mixed with Gal3, and Gal3 alone, showing the presence of a ˜60 kDa band in the IAPP alone condition, and intensification of the band in the IAPP+Gal3 condition. FIG. 9B depicts quantification of the intensity of the bands of FIG. 9A reflecting protein aggregates as detected by the I11 antibody. FIG. 9C depicts a Western blot of IAPP alone, IAPP mixed with Gal3, and Gal3 alone at time points of 0, 0.5, 3, and 5 hours of incubation, suggesting that IAPP oligomerizes after 3 hours of incubation with Gal3. FIG. 9D is the quantification of the intensity of the IAPP bands of FIG. 9C.

[0098] FIG. 10 depicts protein sequences of Gal3 and exemplary proteins that exhibit pathogenic aggregation.

[0099] FIG. 11 depicts peptide sequences of Gal3 used to generate and analyze antibodies.

[0100] FIG. 12A depicts exemplary variable heavy chain complementarity-determining region (CDR) 1 for anti-Gal3 antibodies disclosed herein. In some embodiments, any of the compositions or methods provided herein can include one or more of the variable heavy chain CDR1 provided herein.

[0101] FIG. 12B depicts exemplary variable heavy chain CDR2 for anti-Gal3 antibodies disclosed herein. In some embodiments, any of the compositions or methods provided herein can include one or more of the variable heavy chain CDR2 provided herein.

[0102] FIG. 12C depicts exemplary variable heavy chain CDR3 for anti-Gal3 antibodies disclosed herein. In some embodiments, any of the compositions or methods provided herein can include one or more of the variable heavy chain CDR3 provided herein.

[0103] FIG. 13A depicts exemplary variable light chain CDR1 for anti-Gal3 antibodies disclosed herein. In some embodiments, any of the compositions or methods provided herein can include one or more of the variable light chain CDR1 provided herein.

[0104] FIG. 13B depicts exemplary variable light chain CDR2 for anti-Gal3 antibodies disclosed herein. In some embodiments, any of the compositions or methods provided herein can include one or more of the variable light chain CDR2 provided herein.

[0105] FIG. 13C depicts exemplary variable light chain CDR3 for anti-Gal3 antibodies disclosed herein. In some embodiments, any of the compositions or methods provided herein can include one or more of the variable light chain CDR3 provided herein.

[0106] FIG. 14 depicts exemplary heavy chain variable region (VH) sequences for anti-Gal3 antibodies disclosed herein. In some embodiments, any of the compositions or methods provided herein can include one or more of the VH sequences provided herein.

[0107] FIG. 15 depicts exemplary light chain variable region (VL) sequences for anti-Gal3 antibodies disclosed herein. In some embodiments, any of the compositions or methods provided herein can include one or more of the VL sequences provided herein.

[0108] FIG. 16 depicts exemplary combinations of heavy and light chain CDRs (CDR1, CDR2, and CDR3) of exemplary anti-Gal3 antibodies disclosed herein. In some embodiments, any of the compositions or methods provided herein can include one or more of the heavy and light chain CDR combinations provided herein.

[0109] FIG. 17 depicts exemplary combinations of heavy and light chain variable regions of exemplary anti-Gal3 antibodies disclosed herein. In some embodiments, any of the compositions or methods provided herein can include one or more of the heavy and light chain variable region combinations provided herein.

[0110] FIG. 18 depicts exemplary heavy chain (HC) sequences and light chain (LC) sequences, and possible pairings for exemplary anti-Gal3 antibodies disclosed herein. In some embodiments, any of the compositions or methods provided herein can include one or more of the HC or LC, or pairs of HC and LC sequences provided herein.

[0111] FIG. 19 depicts antibody names used throughout the present disclosure refer to the same antibody (with exemplary peptide and nucleic acid sequences provided elsewhere in the disclosure and appropriately attributed to at least one of the depicted names) and may be used interchangeably. The names shown in a column correspond to the same antibody.

[0112] FIG. 20 depicts an alignment of hinge and constant heavy chain domain 2 (C_{H}2) domain amino acid sequences of wild-type human immunoglobulin G1 (IgG1), IgG2 and IgG4 as well as their sigma variants. The alignment above uses EU numbering. Residues identical to wild-type IgG1 are indicated as dots; gaps are indicated with hyphens. Sequence is given explicitly if it differs from wild-type IgG1 or from the parental subtype for a variants. Open boxes beneath the alignment correspond to International Immunogenetics Information System (IMGT) strand definitions. Boxes beneath the alignment correspond to the strand and helix secondary structure assignment for wild-type IgG1. Residues 267-273 form the BC loop and 322-332 form the FG loop. Also provided are exemplary constant regions for human IgG4 heavy (S228P mutant) and light (kappa) chains (SEQ ID NOs: 931-932) and murine IgG2A (LALAPG and LALA mutants) (SEQ ID NOs: 933-934). In some embodiments, any one or more of the VH/VL and/or CDRs provided in the other figures or otherwise disclosed herein can be paired with any one or more of the exemplary constant regions provided herein.

[0113] FIG. 21 depicts nucleic acid sequences that encode for exemplary heavy chain variable regions of anti-Gal3 antibodies disclosed herein. In some embodiments, any of the compositions or methods provided herein can include one or more of the heavy chain variable regions encoded by the nucleic acids provided herein.

[0114] FIG. 22 depicts nucleic acid sequences that encode for exemplary light chain variable regions of anti-Gal3 antibodies disclosed herein. In some embodiments, any of the compositions or methods provided herein can include one or more of the light chain variable regions encoded by the nucleic acids provided herein.

[0115] FIG. 23 depicts nucleic acid sequences that encode for exemplary heavy chains of anti-Gal3 antibodies disclosed herein. In some embodiments, any of the compositions or methods provided herein can include one or more of the heavy chains encoded by the nucleic acids provided herein.

[0116] FIG. 24 depicts nucleic acid sequences that encode for exemplary light chains of anti-Gal3 antibodies disclosed herein. In some embodiments, any of the compositions or methods provided herein can include one or more of the light chains encoded by the nucleic acids provided herein.

[0117] FIG. 25A-B depicts an exemplary alignment for the heavy chain CDRs (FIG. 25A) and light chain CDRs (FIG. 25B) for the exemplary anti-Gal3 antibodies disclosed herein.

[0118] FIG. 26A-C depict promotion of aggregation of certain polymorphic alleles of apolipoprotein E (APOE) by Gal3. FIG. 26A shows dot blots of APO-E2 mixed with Gal3. FIG. 26B shows dot blots of APO-E3 mixed with Gal3. Neither APO-E2 or APO-E3 showed significant oligomerization when mixed with Gal3. FIG. 26C shows dot blots of APO-E4 mixed with Gal3, showing that APO-E4 is oligomerized when mixed with Gal3.

[0119] FIG. 27A-C depict degradation of APOE-4 oligomers by exemplary anti-Gal3 antibody TB006 by dot blot. FIG. 27A shows that there is a dose-dependent ability of TB006 to degrade APO-E4 oligomers. FIG. 27B shows the 3 hour antibody incubation time point for FIG. 27A. FIG. 27C is the quantification of the TB006-treated conditions of FIG. 27B.

[0120] FIG. 28A-C depict promotion of aggregation of prion protein (PrP) by Gal3 as detected by dot blot. FIG. 28A depicts time course aggregation over 5 hours of r-Prion protein incubated with 100 μg of Gal-3 probed with A11 antibody. FIG. 28B depicts time course aggregation over 5 hours of r-Prion protein incubated with 100 μg of Gal-3 probed with A11 antibody and re-probed with r-Prion mouse antibody. FIG. 28C depicts time course aggregation over 1 hour of r-Prion protein incubated with 100 μg of Gal-3 probed with (A11) antibody and re-probed with r-Prion mouse antibody.

[0121] FIG. 29A-B depicts promotion of aggregation of neurofilament light (NFL) protein by Gal3 as detected by dot blot.

[0122] FIG. 30A-C depict promotion of aggregation of Aβ40 by Gal3 as detected by dot blot. FIG. 30A-C shows 24 hour time course aggregation of Aβ40 incubated with 100 μg of Gal-3 probed with A11 (FIG. 30A), 6E10 (Biolegend, catalog #SIG-39300) (FIG. 30B), and 804 (QC 190207)(FIG. 30C) antibodies.

[0123] FIG. 31A-D depict degradation of toxic Aβ42 oligomers as detected by dot blot. FIG. 31A depicts 24 hour time course degradation of toxic Aβ42 oligomers by hTB006 probed with A11 and 6E10 antibodies. FIG. 31B depicts quantification of Aβ42 oligomer degradation over the 24 hour time course. FIG. 31C depicts 5 hour time course degradation of toxic Aβ42 oligomers by hTB006 probed with A11 and 6E10 antibodies. FIG. 31D depicts quantification of the effect of different concentrations of hTB006 on Gal-3 induced Aβ42 oligomers.

[0124] FIG. 32A-F depict time course aggregation of Fibrin incubated with 100 μg of Gal-3 probed with A11 antibody as detected by dot blot. FIG. 32A depicts time course aggregation of Fibrin incubated with 100 μg of Gal-3 probed with A11 antibody as detected by dot blot. FIG. 32B depicts quantification of Gal-3 intrinsic promotion of Fibrin oligomerization. FIG. 32C depicts degradation of toxic Fibrin oligomers by TB001 and TB006 as detected by dot blot. FIG. 32D depicts screening of different Gal-3 antibody clones on Fibrin oligomerization probed with A11 antibody. FIG. 32E depicts quantification of different Gal-3 antibody clones on Fibrin oligomerization probed with A11 antibody. FIG. 32F is a table depicting the identity and isotype of Gal-3 antibody clones screened.

[0125] FIG. 33 depicts time course aggregation of CRP and SUMO incubated with 100 μg of Gal-3 probed with A11 antibody as detected by dot blot.

[0126] FIG. 34A-C depict time course aggregation of Light Chain, PDGFR, and MCAM, incubated with 100 μg of Gal-3 probed with A11 antibody as detected by dot blot. FIG. 34A depicts time course aggregation of Light Chain incubated with 100 μg of Gal-3 probed with A11 antibody as detected by dot blot. FIG. 34B depicts time course aggregation of PDGFR incubated with 100 μg of Gal-3 probed with A11 antibody as detected by dot blot. FIG. 34C depicts time course aggregation of MCAM incubated with 100 μg of Gal-3 probed with A11 antibody as detected by dot blot.

[0127] FIG. 35A-B depict 24 hour time course aggregation of complement proteins (C3 & C9) incubated with 100 μg of Gal-3 probed with A11 antibody as detected by dot blot. FIG. 35A depicts 24 hour time course aggregation of complement proteins C3 incubated with 100 μg of Gal-3 probed with A11 antibody as detected by dot blot. FIG. 35B depicts 24 hour time course aggregation of complement protein C9 incubated with 100 μg of Gal-3 probed with A11 antibody as detected by dot blot.

[0128] FIG. 36 depicts 24 hour time course aggregation of lysozyme incubated with 100 μg of Gal-3 probed with A11 antibody as detected by dot blot.

[0129] FIG. 37 depicts 4 hour time course aggregation of insulin incubated at 50 C with 100 μg and 200 μg of Gal-3 probed with A11 antibody as detected by dot blot.

[0130] FIG. 38A-B depicts 5 hour time course aggregation of native haemoglobin (Hb) and glycosylated haemoglobin (HbAIC) incubated at room temperature (RT) and 37 C with 100 μg of Gal-3 probed with A11 antibody as detected by dot blot. FIG. 38A depicts 5 hour time course aggregation of native haemoglobin (Hb) incubated at room temperature (RT) and 37 C with 100 μg of Gal-3 probed with A11 antibody as detected by dot blot. FIG. 38B depicts 5 hour time course aggregation of glycosylated haemoglobin (HbAIC) incubated at room temperature (RT) and 37 C with 100 μg of Gal-3 probed with A11 antibody as detected by dot blot.

[0131] FIG. 39A-B depict 5 hour time course aggregation of phenylalanine (Phe) incubated at room temperature (RT) and 37 C with 100 μg of Gal-3 probed with A11 antibody as detected by dot blot.

[0132] FIG. 40 depicts 5 hour time course aggregation of glutamine (GLN) incubated at room temperature (RT) with 100 μg of Gal-3 probed with A11 antibody as detected by dot blot.

[0133] FIG. 41 depicts 5 hour time course aggregation of cholesteryl (Co-Esteryl) incubated at room temperature (RT) with 100 μg of Gal-3 probed with A11 antibody as detected by dot blot.

[0134] FIG. 42A-B depicts 5 hour time course aggregation of cholesterol incubated at room temperature (RT) with 100 μg of Gal-3 probed with antibody as detected by dot blot.

[0135] FIG. 43A-B depicts aggregation of neuroserpin incubated at room temperature (RT) with 100 μg of Gal-3 probed with antibody. FIG. 43A depicts 5 hour time course aggregation of neuroserpin as detected by dot blot. FIG. 43B depicts visualization of neuroserpin aggregation with and without Gal-3 as detected using fluorescent microscopy.

[0136] FIG. 44A-B depict comparative degradation of Aβ42 oligomers by TB139 and TB006 incubated at RT and probed with oligomer A11 6E10 degrading antibody as detected by dot blot. FIG. 44A depicts comparative degradation of Aβ42 oligomers by TB139 and TB006 incubated at RT and probed with oligomer A11 degrading antibody as detected by dot blot. FIG. 44B depicts comparative degradation of Aβ42 oligomers by TB139 and TB006 incubated at RT and probed with 6E10 degrading antibody as detected by dot blot.

[0137] FIG. 45A-B depicts time course aggregation of Crystallin AA incubated with 100 μg of Gal-3 probed with A11 antibody. FIG. 45A depicts visualization of Crystallin AA aggregation with and without Gal-3 as detected using fluorescent microscopy. FIG. 45B depicts time course aggregation of Crystallin AA incubated with 100 μg of Gal-3 probed with A11 antibody as detected by dot blot.

[0138] FIG. 46A-B depicts time course aggregation of Crystallin AA incubated with 100 μg of Gal-3 probed with A11 antibody. FIG. 46A depicts visualization of Crystallin AB aggregation with and without Gal-3 as detected using fluorescent microscopy. FIG. 46B depicts time course aggregation of Crystallin AB incubated with 100 μg of Gal-3 probed with A11 antibody as detected by dot blot.

[0139] FIG. 47A-F depicts time course aggregation of Cystatin-C incubated with 100 μg of Gal-3 probed with A11 antibody as detected by dot blot. FIG. 47A depicts 24 hour time course aggregation of Cystatin-C incubated with 100 μg of Gal-3 probed with A11 antibody as detected by dot blot. FIG. 47B depicts 24 hour time course aggregation of Cystatin-C incubated with 100 μg of Gal-3 probed with Cystatin-C antibody as detected by dot blot. FIG. 47C depicts 24 hour time course aggregation of Cystatin-C incubated with 100 μg of Gal-3 probed with 804 antibody as detected by dot blot. FIG. 47D depicts 5 hour time course aggregation of Cystatin-C incubated with Gal-3 probed with A11 antibody as detected by dot blot. FIG. 47E depicts 5 hour time course aggregation of Cystatin-C incubated with Gal-3 probed with cystatin-C antibody as detected by dot blot. FIG. 47F depicts 5 hour time course aggregation of Cystatin-C incubated with Gal-3 probed with 804 antibody as detected by dot blot.

[0140] FIG. 48A-C depicts 24 hour time course aggregation of Myostatin pro-peptide incubated with 100 μg of Gal-3 probed with A11 antibody. FIG. 48A depicts 24 hour time course aggregation of Myostatin pro-peptide incubated with 100 μg of Gal-3 probed with A11 antibody as detected by dot blot. FIG. 48B-C depict visualization of myostatin pro-peptide aggregation at 5, 24, and 48 hours with and without Gal-3 as detected using fluorescent microscopy.

[0141] FIG. 49A-G depicts Insulin oligomerization by Gal-3 and screening of different Gal-3 antibody clones for degradation of insulin oligomerization probed with oligomer degrading A11 antibody. FIG. 49A depicts 3 hour time course aggregation of insulin incubated at 50 C with Gal-3 probed with A11 antibody as detected by dot blot. FIG. 49B depicts aggregation of insulin incubated with Gal-3 for 48 hours and probed with A11 antibody as detected by dot blot. FIG. 49C depicts quantification of insulin aggregation when incubated with Gal-3 for 48 hours and probed with A11 antibody. FIG. 49D depicts a chart depicting the identity and isotype of the Gal-3 antibody clones that were Screened. FIG. 49E depicts visualization of insulin aggregation at three hours with and without Gal-3 as detected using fluorescent microscopy. FIG. 49F depicts 4 hour time course aggregation of Insulin incubated with 100 μg of Gal-3 probed with A11 antibody. FIG. 49F depicts 4 hour time course aggregation of Insulin incubated with 100 μg of Gal-3 probed with anti-Gal3 antibody.

[0142] FIG. 50 depicts a 48-hour time course of recombinant human calcitonin (hCT) aggregation when incubated with 100 μg of Gal-3 probed with A11 antibody as detected by dot blot.

[0143] FIG. 51A-B depicts Gal-3 promotion of Atrial Natriuretic Peptide (ANP) aggregation. FIG. 51A depicts embodiments of an 80-hour time course of ANP aggregation when incubated with 100 μg of Gal-3 probed with A11 antibody as detected by dot blot. FIG. 51B depicts embodiments of fluorescent microscopic visualization of ANP aggregation when incubated with 100 μg of Gal-3 probed with A11 antibody.

[0144] FIG. 52A-B depicts Gal-3 promotion of Pro-B type Natriuretic Peptide (BNP) aggregation. FIG. 52A depicts embodiments of a 48-hour time course of BNP aggregation when incubated with 100 μg of Gal-3 probed with A11 antibody as detected by dot blot. FIG. 52B depicts embodiments of fluorescent microscopic visualization of BNP aggregation when incubated with 100 μg of Gal-3 probed with A11 antibody and incubated for 24-hours at room temperature.

[0145] FIG. 53 depicts embodiments of a 72-hour time course of Serum Amyloid A (SAA1) aggregation when incubated with 100 μg of Gal-3 probed with A11 antibody as detected by dot blot.

[0146] FIG. 54A-B depicts embodiments of Islet Amyloid Polypeptide (IAPP) when incubated with or without Gal-3. FIG. 54A depicts embodiments of a 24-hour time course of IAPP aggregation when incubated with 100 μg of Gal-3 probed with A11 antibody as detected by dot blot. FIG. 54B depicts embodiments of fluorescent microscopic visualization of IAPP aggregation when incubated with 100 μg of Gal-3 probed with A11 antibody.

[0147] FIG. 55A-F depicts embodiments of TDP43 aggregation when incubated with or without Gal-3. FIG. 55A depicts embodiments of a 24-hour time course of TDP43 aggregation when incubated with 100 μg of Gal-3 probed with A11 antibody. FIG. 55B depicts embodiments of a 24-hour time course of TDP43 aggregation when incubated with 100 μg of Gal-3 probed with TDP43 antibody. FIG. 55C depicts embodiments of a 24-hour time course of TDP43 aggregation when incubated with 100 μg of Gal-3 probed with Gal-3 antibody. FIG. 55D depicts a 5-hour time course aggregation profile of TDP43 with and without rhGal-3 probed with TDP43 antibody. FIG. 55E depicts some embodiments of quantification of a 5-hour time course aggregation profile of TDP43 with and without rhGal-3 probed with TDP43 antibody. FIG. 55F depicts a 5-day time course aggregation profile of TDP43 with and without rhGal-3 probed with TDP43 antibody.

[0148] FIG. 56 is an illustrative representation of some embodiments depicting alternative pathways and assembled states of amyloid.

[0149] FIG. 57 is a flow chart depicting some embodiments of methods for inhibiting Gal3-mediated aggregation of a protein.

[0150] FIG. 58 is a flow chart depicting embodiments of a method of treating amyloid proteopathy in a subject.

[0151] FIG. 59 depicts some embodiments of a polypeptide sequence encoding hGal3 and epitope peptides used for epitope mapping analysis of TB006, TB101 and 2D10 Ab binding with Gal 3 peptides by Microarray & ELISA.

[0152] FIG. 60 depicts some embodiments of mutational analysis of TB006 Ab binding with Gal 3 peptides by Microarray.

[0153] FIG. 61 depicts some embodiments of mutational analysis of TB101 Ab binding with Gal 3 peptides by Microarray.

[0154] FIG. 62 depicts some embodiments of mutational analysis of 2D10 Ab binding with Gal 3 peptides by Microarray.

[0155] FIG. 63 depicts some embodiments of mutational analysis of TB006, TB101, 2D10 Ab binding with Gal 3 peptides by Microarray.

[0156] FIG. 64 is an illustrative embodiment showing a comparison of some embodiments of epitope mapping analysis.

[0157] FIG. 65 is an illustrative embodiment showing a comparison of some embodiments of epitope mapping analysis. Chain A represents the amino acid numbers on the 18 aa peptide whereas Chain B represents the amino acid numbers on the Heavy chain of TB006 FAb and Chain L represents the light chain.

[0158] FIG. 66A-k depict some illustrative embodiments of a heat map showing the affinity of anti-Gal3 blocking antibodies to various Gal3 residues. FIG. 66A is a table listing some illustrative embodiments of anti-Gal3 blocking antibodies. FIG. 66B-66K are illustrative heat maps showing the affinity of some embodiments of anti-Gal3 blocking antibodies to Gal3 epitopes.

[0159] FIG. 67 is a table depicting the ability of 33 different anti-Gal3 blocking antibodies to block binding of hTB001, hTB006, Aβ42, Aβ40, Aβ42 alpha synuclein, and hTau to Gal3. That is, these antibodies compete for binding to Gal3 with the above proteins.

[0160] FIG. 68 is a table depicting the ability of 33 different anti-Gal3 blocking antibodies to block binding of hTB006as to Gal3 measured by Elisa. That is, these antibodies compete for binding to Gal3 with the above proteins.

[0161] FIG. 69 depicts the results of an ELISA assay examining binding of hGal3 to aggregated prion protein.

[0162] FIG. 70 depicts the results of an ELISA assay examining binding of hGal3 to aggregated Aβ40.

[0163] FIG. 71 depicts the results of an ELISA blocking assay.

[0164] FIG. 72 is a table quantifying the effect of various anti-Gal3 antibodies at blocking hGal3 binding to Aβ40.

[0165] FIG. 73 depicts the results of the ELISA assay examining binding of hGal3 to aggregated phospho-Tau.

[0166] FIG. 74 is a table depicting the quantified results of an ELISA screen.

[0167] FIG. 75 is a table depicting the quantified results of an ELISA screen.

[0168] FIG. 76 depicts the results of an ELISA assay examining binding of hGal3 to aggregated prion protein.

[0169] FIG. 77 depicts the results of an ELISA assay examining binding of hGal3 to aggregated cholesterol.

[0170] FIG. 78 depicts the results of an ELISA assay examining binding of hGal3 to 5 hour aggregated cholesterol.

[0171] FIG. 79 depicts the results of an ELISA assay examining binding of hGal3 to aggregated insulin.

[0172] FIG. 80 depicts the results of an ELISA assay examining binding of hGal3 to aggregated prion protein.

[0173] FIG. 81 depicts the results of an ELISA assay examining blocking efficacy of various antibodies against binding of hGal3 to aggregated prion protein.

[0174] FIG. 82 depicts the results of the ELISA assay examining binding of hGal3 to aggregated NFL.

[0175] FIG. 83 depicts the results of the ELISA assay examining binding of hGal3 to aggregated NFL.

[0176] FIG. 84 depicts the results of the ELISA assay examining binding of hGal3 to aggregated C3.

[0177] FIG. 85 depicts the results of the ELISA assay determining the IC50s of anti-hGal3 antibodies against hGal3:C3.

[0178] FIG. 86 depicts the results of the ELISA assay examining binding of hGal3 to aggregated C9.

[0179] FIG. 87 depicts the results of the ELISA assay determining the IC50s of anti-hGal3 antibodies against hGal3:C9.

[0180] FIG. 88 depicts the results of an ELISA assay examining binding of hGal3 to aggregated and unaggregated ANP.

[0181] FIG. 89 depicts the results of an ELISA assay examining binding of hGal3 to various versions of calcitonin with hGal3.

[0182] FIG. 90 depicts the results of an ELISA assay examining binding of hGal3 to aggregated and unaggregated IAPP.

[0183] FIG. 91 depicts the results of an ELISA assay examining binding of hGal3 to aggregated alpha-synuclein.

[0184] FIG. 92 depicts the results of a blocking efficacy determination as measured by Elisa.

[0185] FIG. 93 is a table depicting the blocking efficacy of QC200137 IMTAB0172 14H10.2C9-hIgG4(S228P), IMTAB0111 F798-9C.13H12.2F8-hIgG4(S228P), QC200172 IMTAB0196 846.1H12-hIgG4(S228P), TB006 (QC200208), hIgG4 synagis (QC200234)(negative control).

[0186] FIG. 94 shows the isolation of TB006 Fab.

[0187] FIG. 95 depicts the crystal structure analysis of TB006 Fab and hGal-3 peptide. a-d. Side view (a and b) and top view (c and d) of overall structure of TB006 Fab in complex with hGal3. Light chain and heavy chain of TB006 Fab are illustrated as light pink and pale cyan respectively. CDRs from the light chain and heavy chain are colored in magentas and marine respectively. Gold color ribbon represents the hGal3 peptide. e. Interaction interface of TB006 Fab and hGal3 peptide. f and g. Detailed interaction amino acids between TB006 Fab light chain (f) or heavy chain (g) and hGal3 peptide. The black dash indicates hydrogen bond with distance of 3.1 Å. Interactions not highlighted are hydrophobic interaction.

[0188] FIG. 96 depicts a summary of interaction between TB006 Fab and hGal-3 peptide. Dot lines indicate the interactions between CDRs and hGal-3 peptide. Residues highlighted are out of CDR frames.

[0189] FIG. 97 depicts reduced GLUT-4 translocation in L-6 cells when with Gal3+insulin aggregates as compared to insulin treatment alone.

### DETAILED DESCRIPTION OF THE DISCLOSURE

[0190] Galectin-3 (Gal3, GAL3) is known to play an important role in cell proliferation, adhesion, differentiation, angiogenesis, and apoptosis. This activity is, at least in part, due to immunomodulatory properties and binding affinity towards other immune regulatory proteins, signaling proteins, and other cell surface markers.

[0191] Gal3 functions by distinct N-terminal and C-terminal domains. The N-terminal domain (isoform 1: amino acids 1-111, isoform 3: amino acids 1-125) comprise a tandem repeat domain (TRD, isoform 1: amino acids 36-109, isoform 3: amino acids 50-123) and is largely responsible for oligomerization of Gal3. The C-terminal domain (isoform 1: amino acids 112-250, isoform 3: amino acids 126-264) comprise a carbohydrate-recognition-binding domain (CRD), which binds to β-galactosides. An exemplary sequence for isoform 1 of human Gal3 (NCBI Reference No. NP_002297.2) is shown in SEQ ID NO: 1. An exemplary sequence for isoform 3 of human Gal3 (NCBI Reference No. NP_001344607.1) is shown in SEQ ID NO: 2.

[0192] As provided herein, Gal3 is shown to promote oligomerization of various proteins, such as α-synuclein, tau protein, TDP-43, transthyretin, uromodulin, islet amyloid polypeptide (IAPP), serum amyloid A (SAA), p53, apolipoprotein E (APOE), APOE-4, prion protein, fibrin, or neurofilament light (NFL), CRP, SUMO, light chain, platelet-derived growth factor receptor (PDGFR), melanoma cell adhesion molecule (MCAM), complement proteins C3 and/or C9, lysozyme, insulin, native haemoglobin (Hb), glycosylated haemoglobin (HbAIC), phenylalanine (Phe), glutamine (Gln), cholesteryl (co-esteryl), cholesterol, neuroserpin, Crystallin AA and/or Crystallin AB, cystatin-C, or myostatin propeptide, or any combination thereof.

[0193] The aggregation of these proteins as oligomers may cause a wide range of proteopathies, including but not limited to an amylodiopathy, Alzheimer's disease, cerebral 3-amyloid angiopathy, retinal ganglion cell degeneration in glaucoma, Parkinson's disease, dementia with Lewy bodies, multiple system atrophy, synucleinopathy, Pick's disease, corticobasal degeneration, tauopathy, progressive supranuclear palsy, TDP-43 proteopathy, amyotrophic lateral sclerosis, frontotemporal lobar degeneration, Huntington's disease, dentatorubropallidoluysian atrophy, spinal and bulbal muscular atrophy, spinocerebellar ataxia, fragile X syndrome, Baratela-Scott syndrome, Freidrich's ataxia, myotonic dystrophy, Alexander disease, familial British dementia, familial Danish dementia, Palizaeus-Merzbacher disease, seipinopathy, SAA amyloidosis, AA (secondary) amyloidosis, type II diabetes, fibrinogen amyloidosis, dialysis amyloidosis, inclusion body myositis/myopathy, familial amyloidotic neuropathy, senile systemic amyloidosis, serpinopathy, TTR amyloidosis, cardiac amyloidosis, cardiac atrial amyloidosis, uromodulin-associated kidney disease, IAPP amyloidosis, rheumatoid arthritis, inflammatory arthritis, spondyloarthropathies, juvenile idiopathic arthritis, ankylosing spondylitis, psoriatic arthritis, inflammatory bowel disease, ulcerative colitis, Crohn's disease, celiac disease, vasculitis, sarcoidosis, familial Mediterranean fever, tumor necrosis factor receptor-associated periodic syndrome (TRAPS), pituitary prolactinoma, insulin amyloidosis, corneal lactoferrin amyloidosis, pulmonary alveolar proteinosis, seminal vesicle amyloid, cutaneous lichen amyloidosis, Mallory bodies, odontogenic (Pindborg) tumor amyloid, cancer, aging promoted by amyloid aggregation, or any disease caused by the misfolding or aggregation of proteins, or otherwise known by a person skilled in the art.

[0194] Disclosed herein are methods of treating, reducing, ameliorating, or preventing incidence of a proteopathy in a cell or subject by inhibiting the oligomer promoting activity of Gal3. This may be accomplished using an antibody or binding fragment thereof that binds to Gal3.

### Definitions

[0195] In the following detailed description, reference is made to the accompanying drawings, which form a part hereof. In the drawings, similar symbols typically identify similar components, unless context dictates otherwise. The illustrative embodiments described in the detailed description, drawings, and claims are not meant to be limiting. Other embodiments may be utilized, and other changes may be made, without departing from the spirit or scope of the subject matter presented herein. It will be readily understood that the aspects of the present disclosure, as generally described herein, and illustrated in the Figures, can be arranged, substituted, combined, separated, and designed in a wide variety of different configurations, all of which are explicitly contemplated herein.

[0196] Unless defined otherwise, all technical and scientific terms used herein have the same meaning as is commonly understood by one of skill in the art to which the claimed subject matter belongs. It is to be understood that the foregoing general description and the following detailed description are exemplary and explanatory only and are not restrictive of any subject matter claimed.

[0197] The section headings used herein are for organizational purposes only and are not to be construed as limiting the subject matter described.

[0198] In this application, the use of the singular includes the plural unless specifically stated otherwise. It must be noted that, as used in the specification and the appended claims, the singular forms “a,” “an” and “the” include plural referents unless the context clearly dictates otherwise. In this application, the use of “or” means “and/or” unless stated otherwise. Furthermore, use of the term “including” as well as other forms, such as “include”, “includes,” and “included,” is not limiting.

[0199] By “about” is meant a quantity, level, value, number, frequency, percentage, dimension, size, amount, weight or length that varies by as much as 30, 25, 20, 15, 10, 9, 8, 7, 6, 5, 4, 3, 2 or 1% to a reference quantity, level, value, number, frequency, percentage, dimension, size, amount, weight or length.

[0200] Throughout this specification, unless the context requires otherwise, the words “comprise,” “comprises,” and “comprising” will be understood to imply the inclusion of a stated step or element or group of steps or elements but not the exclusion of any other step or element or group of steps or elements. By “consisting of” is meant including, and limited to, whatever follows the phrase “consisting of” Thus, the phrase “consisting of” indicates that the listed elements are required or mandatory, and that no other elements may be present. By “consisting essentially of” is meant including any elements listed after the phrase and limited to other elements that do not interfere with or contribute to the activity or action specified in the disclosure for the listed elements. Thus, the phrase “consisting essentially of” indicates that the listed elements are required or mandatory, but that other elements are optional and may or may not be present depending upon whether or not they materially affect the activity or action of the listed elements.

[0201] As used herein, the terms “individual(s)”, “subject(s)” and “patient(s)” mean any mammal. In some embodiments, the mammal is a human. In some embodiments, the mammal is a non-human. None of the terms require or are limited to situations characterized by the supervision (e.g. constant or intermittent) of a health care worker (e.g. a doctor, a registered nurse, a nurse practitioner, a physician's assistant, an orderly or a hospice worker).

[0202] The terms “polypeptide”, “peptide”, and “protein” are used interchangeably herein to refer to polymers of amino acids of any length. The polymer may be linear, cyclic, or branched, it may comprise modified amino acids, and it may be interrupted by non-amino acids. The terms also encompass amino acid polymers that have been modified, for example, via sulfation, glycosylation, lipidation, acetylation, phosphorylation, iodination, methylation, oxidation, proteolytic processing, phosphorylation, prenylation, racemization, selenoylation, transfer-RNA mediated addition of amino acids to proteins such as arginylation, ubiquitination, or any other manipulation, such as conjugation with a labeling component.

[0203] As used herein the term “amino acid” refers to either natural and/or unnatural or synthetic amino acids, including glycine and both the D or L optical isomers, and amino acid analogs and peptidomimetics.

[0204] As used herein, the term “peptidomimetic” refers to any peptide analog that is able to mimic the structural elements and functionality of natural peptides while also retaining the capability to interact with a biological target and produce the same biological effect as its corresponding natural peptide.

[0205] As used herein, the term “oligomer” refers to a molecule that includes a few similar or identical repeating units which could be derived, from copies of a smaller molecule, its monomer. In some embodiments, the oligomer comprises repeating units of a protein monomer. In some embodiments the oligomer comprises repeating units of α-synuclein, tau protein, TDP-43, transthyretin, uromodulin, islet amyloid polypeptide (IAPP), serum amyloid A (SAA), p53, apolipoprotein E (APOE), APOE-4, prion protein, fibrin, or neurofilament light (NFL), CRP, SUMO, light chain, platelet-derived growth factor receptor (PDGFR), melanoma cell adhesion molecule (MCAM), complement proteins C3 and/or C9, lysozyme, insulin, native haemoglobin (Hb), glycosylated haemoglobin (HbAIC), phenylalanine (Phe), glutamine (Gln), cholesteryl (co-esteryl), cholesterol, neuroserpin, Crystallin AA and/or Crystallin AB, cystatin-C, or myostatin propeptide, and/or any combination thereof. In some embodiment, the oligomer is any repeating biological molecule or unit that is known to aggregate into oligomers.

[0206] A polypeptide or amino acid sequence “derived from” a designated protein refers to the origin of the polypeptide. Preferably, the polypeptide has an amino acid sequence that is essentially identical to that of a polypeptide encoded in the sequence, or a portion thereof wherein the portion consists of at least 10-20 amino acids, or at least 20-30 amino acids, or at least 30-50 amino acids, or which is immunologically identifiable with a polypeptide encoded in the sequence. This terminology also includes a polypeptide expressed from a designated nucleic acid sequence. Peptide sequences having at least 80%, 85%, 90%, 95%, 99%, or 100% homology to any one of the peptide sequences disclosed herein and having the same or similar functional properties are envisioned. The percent homology may be determined according to amino acid substitutions, deletions, or additions between two peptide sequences. Peptide sequences having some percent homology to any one of the peptide sequences disclosed herein may be produced and tested by one skilled in the art through conventional methods.

[0207] As used herein, the term “antibody” denotes the meaning ascribed to it by one of skill in the art, and further it is intended to include any polypeptide chain-containing molecular structure with a specific shape that fits to and recognizes an epitope, where one or more non-covalent binding interactions stabilize the complex between the molecular structure and the epitope. Antibodies may be polyclonal antibodies, although monoclonal antibodies may be preferred because they may be reproduced by cell culture or recombinantly and can be modified to reduce their antigenicity.

[0208] In addition to entire immunoglobulins (or their recombinant counterparts), immunoglobulin fragments or “binding fragments” comprising the epitope binding site (e.g., Fab′, F(ab′)₂, single-chain variable fragment (scFv), diabody, minibody, nanobody, single-domain antibody (sdAb), or other fragments) are useful as antibody moieties in the present invention. Such antibody fragments may be generated from whole immunoglobulins by ricin, pepsin, papain, or other protease cleavage. Minimal immunoglobulins may be designed utilizing recombinant immunoglobulin techniques. For instance “Fv” immunoglobulins for use in the present invention may be produced by linking a variable light chain region to a variable heavy chain region via a peptide linker (e.g., poly-glycine or another sequence which does not form an alpha helix or beta sheet motif). Nanobodies or single-domain antibodies can also be derived from alternative organisms, such as dromedaries, camels, llamas, alpacas, or sharks. In some embodiments, antibodies can be conjugates, e.g. pegylated antibodies, drug, radioisotope, or toxin conjugates. Monoclonal antibodies directed against a specific epitope, or combination of epitopes, will allow for the targeting and/or depletion of cellular populations expressing the marker. Various techniques can be utilized using monoclonal antibodies to screen for cellular populations expressing the marker(s), and include magnetic separation using antibody-coated magnetic beads, “panning” with antibody attached to a solid matrix (i.e., plate), and flow cytometry (e.g. U.S. Pat. No. 5,985,660, hereby expressly incorporated by reference in its entirety).

[0209] As known in the art, the term “Fc region” is used to define a C-terminal region of an immunoglobulin heavy chain. The “Fe region” may be a native sequence Fc region or a variant Fc region. Although the boundaries of the Fc region of an immunoglobulin heavy chain might vary, the human IgG heavy chain Fc region is usually defined to stretch from an amino acid residue at position Cys226, or from Pro230, to the carboxyl-terminus thereof. The numbering of the residues in the Fc region is that of the EU index as in Kabat. Kabat et al., Sequences of Proteins of Immunological Interest, 5th Ed. Public Health Service, National Institutes of Health, Bethesda, Md., 1991. The Fc region of an immunoglobulin generally comprises two constant domains, CH2 and CH3. As is known in the art, an Fc region can be present in dimer or monomeric form.

[0210] As known in the art, a “constant region” of an antibody refers to the constant region of the antibody light chain or the constant region of the antibody heavy chain, either alone or in combination.

[0211] A “variable region” of an antibody refers to the variable region of the antibody light chain or the variable region of the antibody heavy chain, either alone or in combination. As known in the art, the variable regions of the heavy and light chains each consist of four framework regions (FRs) connected by three complementarity determining regions (CDRs) also known as hypervariable regions, and contribute to the formation of the antigen binding site of antibodies. If variants of a subject variable region are desired, particularly with substitution in amino acid residues outside of a CDR region (i.e., in the framework region), appropriate amino acid substitution, preferably, conservative amino acid substitution, can be identified by comparing the subject variable region to the variable regions of other antibodies which contain CDR1, CDR2, and CDR3 sequences in the same canonical class as the subject variable region (Chothia and Lesk, J Mol Biol 196(4): 901-917, 1987).

[0212] In certain embodiments, definitive delineation of a CDR and identification of residues comprising the binding site of an antibody is accomplished by solving the structure of the antibody and/or solving the structure of the antibody-ligand complex. In certain embodiments, that can be accomplished by any of a variety of techniques known to those skilled in the art, such as X-ray crystallography. In certain embodiments, various methods of analysis can be employed to identify or approximate the CDR regions. In certain embodiments, various methods of analysis can be employed to identify or approximate the CDR regions. Examples of such methods include, but are not limited to, the Kabat definition, the Chothia definition, the IMGT approach (Lefranc et al., 2003) Dev Comp Immunol. 27:55-77), computational programs such as Paratome (Kunik et al., 2012, Nucl Acids Res. W521-4), the AbM definition, and the conformational definition.

[0213] The Kabat definition is a standard for numbering the residues in an antibody and is typically used to identify CDR regions. See, e.g., Johnson & Wu, 2000, Nucleic Acids Res., 28: 214-8. The Chothia definition is similar to the Kabat definition, but the Chothia definition takes into account positions of certain structural loop regions. See, e.g., Chothia et al., 1986, J. Mol. Biol., 196: 901-17; Chothia et al., 1989, Nature, 342: 877-83. The AbM definition uses an integrated suite of computer programs produced by Oxford Molecular Group that model antibody structure. See, e.g., Martin et al., 1989, Proc Natl Acad Sci (USA), 86:9268-9272; “AbM™., A Computer Program for Modeling Variable Regions of Antibodies,” Oxford, UK; Oxford Molecular, Ltd. The AbM definition models the tertiary structure of an antibody from primary sequence using a combination of knowledge databases and ab initio methods, such as those described by Samudrala et al., 1999, “Ab Initio Protein Structure Prediction Using a Combined Hierarchical Approach,” in PROTEINS, Structure, Function and Genetics Suppl., 3:194-198. The contact definition is based on an analysis of the available complex crystal structures. See, e.g., MacCallum et al., 1996, J. Mol. Biol., 5:732-45. In another approach, referred to herein as the “conformational definition” of CDRs, the positions of the CDRs may be identified as the residues that make enthalpic contributions to antigen binding. See, e.g., Makabe et al., 2008, Journal of Biological Chemistry, 283:1156-1166. Still other CDR boundary definitions may not strictly follow one of the above approaches, but will nonetheless overlap with at least a portion of the Kabat CDRs, although they may be shortened or lengthened in light of prediction or experimental findings that particular residues or groups of residues do not significantly impact antigen binding. As used herein, a CDR may refer to CDRs defined by any approach known in the art, including combinations of approaches. The methods used herein may utilize CDRs defined according to any of these approaches. For any given embodiment containing more than one CDR, the CDRs may be defined in accordance with any of Kabat, Chothia, extended, IMGT, Paratome, AbM, and/or conformational definitions, or a combination of any of the foregoing.

[0214] As disclosed herein, sequences having a % identity to any of the sequences disclosed herein are envisioned and may be used. The terms “% identity” refer to the percentage of units (i.e. amino acids or nucleotides) that are the same between two or more sequences relative to the length of the sequence. When the two or more sequences being compared are the same length, the % identity will be respective that length. When two or more sequences being compared are different lengths, deletions and/or insertions may be introduced to obtain the best alignment. In some embodiments, these sequences may include peptide sequences, nucleic acid sequences, CDR sequences, variable region sequences, or heavy or light chain sequences. In some embodiments, any sequence having at least 80%, 81%, 82%, 83%, 84%, 85%, 86%, 87%, 88%, 89%, 90%, 91%, 92%, 93%, 94%, 95%, 96%, 97%, 98%, 99%, or 100% sequence identity to any of the sequences disclosed herein may be used. In some embodiments, any sequence having at least 0, 1, 2, 3, 4, 5, 6, 7, 8, 9, 10, 11, 12, 13, 14, 15, 16, 17, 18, 19, 20, 21, 22, 23, 24, 25, 26, 27, 28, 29, 30, 31, 32, 33, 34, 35, 36, 37, 38, 39, 40, 41, 42, 43, 44, 45, 46, 47, 48, 49, or 50 substitutions, deletions, or additions relative to any of the sequences disclosed herein may be used. The changes in sequences may apply to, for example, single amino acids, single nucleic acid bases, or nucleic acid codons; however, differences in longer stretches of sequences are also envisioned. As applied to antibody sequences, these differences in sequences may apply to antigen-binding regions (e.g., CDRs) or regions that do not bind to antigens or are only secondary to antigen binding (e.g., framework regions).

[0215] As disclosed herein, sequences having a % homology to any of the sequences disclosed herein are envisioned and may be used. The term “% homology” refers to the degree of conservation between two sequences when considering their three-dimensional structure. For example, homology between two protein sequences may be dependent on structural motifs, such as beta strands, alpha helices, and other folds, as well as their distribution throughout the sequence. Homology may be determined through structural determination, either empirically or in silico. In some embodiments, any sequence having at least 80%, 81%, 82%, 83%, 84%, 85%, 86%, 87%, 88%, 89%, 90%, 91%, 92%, 93%, 94%, 95%, 96%, 97%, 98%, 99%, or 100% sequence homology to any of the sequences disclosed herein may be used. In some embodiments, any sequence having at least 0, 1, 2, 3, 4, 5, 6, 7, 8, 9, 10, 11, 12, 13, 14, 15, 16, 17, 18, 19, 20, 21, 22, 23, 24, 25, 26, 27, 28, 29, 30, 31, 32, 33, 34, 35, 36, 37, 38, 39, 40, 41, 42, 43, 44, 45, 46, 47, 48, 49, or 50 substitutions, deletions, or additions relative to any of the sequences disclosed herein, which may or may not affect the overall % homology, may be used.

[0216] As applied herein, sequences having a certain % similarity to any of the sequence disclosed herein are envisioned and may be used. In some embodiments, these sequences may include peptide sequences, nucleic acid sequences, CDR sequences, variable region sequences, or heavy or light chain sequences. As understood in the art with respect to peptide sequences, “similarity” refers to the comparison of amino acids based on their properties, including but not limited to size, polarity, charge, pK, aromaticity, hydrogen bonding properties, or presence of functional groups (e.g. hydroxyl, thiol, amine, carboxyl, and the like). The term “% similarity” refers to the percentage of units (i.e. amino acids) that are the same between two or more sequences relative to the length of the sequence. When the two or more sequences being compared are the same length, the % similarity will be respective that length. When two or more sequences being compared are different lengths, deletions and/or insertions may be introduced to obtain the best alignment. The similarity of two amino acids may dictate whether a certain substitution is conservative or non-conservative. Methods of determining the conservativeness of an amino acid substitution are generally known in the art and may involve substitution matrices. Commonly used substitution matrices include BLOSUM45, BLOSUM62, BLOSUM80, PAM100, PAM120, PAM160, PAM200, PAM250, but other substitution matrices or approaches may be used as considered appropriate by the skilled person. A certain substitution matrix may be preferential over the others when considering aspects such as stringency, conservation and/or divergence of related sequences (e.g. within the same species or broader), and length of the sequences in question. As used herein, a peptide sequence having a certain % similarity to another sequence will have up to that % of amino acids that are either identical or an acceptable substitution as governed by the method of similarity determination used. In some embodiments, a sequence having at least 80%, 81%, 82%, 83%, 84%, 85%, 86%, 87%, 88%, 89%, 90%, 91%, 92%, 93%, 94%, 95%, 96%, 97%, 98%, 99%, or 100% sequence similarity to any of the sequences disclosed herein may be used. In some embodiments, any sequence having at least 0, 1, 2, 3, 4, 5, 6, 7, 8, 9, 10, 11, 12, 13, 14, 15, 16, 17, 18, 19, 20, 21, 22, 23, 24, 25, 26, 27, 28, 29, 30, 31, 32, 33, 34, 35, 36, 37, 38, 39, 40, 41, 42, 43, 44, 45, 46, 47, 48, 49, or 50 similar substitutions relative to any of the sequences disclosed herein may be used. As applied to antibody sequences, these similar substitutions may apply to antigen-binding regions (i.e. CDRs) or regions that do not bind to antigens or are only secondary to antigen binding (i.e. framework regions).

[0217] The term “consensus sequence” as used herein with regard to sequences refers to the generalized sequence representing all of the different combinations of permissible amino acids at each location of a group of sequences. A consensus sequence may provide insight into the conserved regions of related sequences where the unit (e.g. amino acid or nucleotide) is the same in most or all of the sequences, and regions that exhibit divergence between sequences. In the case of antibodies, the consensus sequence of a CDR may indicate amino acids that are important or dispensable for antigen binding. It is envisioned that consensus sequences may be prepared with any of the sequences provided herein, and the resultant various sequences derived from the consensus sequence can be validated to have similar effects as the template sequences.

[0218] The term “compete,” as used herein with regard to an antibody, means that a first antibody, or an antigen-binding portion thereof, binds to an epitope in a manner sufficiently similar to the binding of a second antibody, or an antigen-binding portion thereof, such that the result of binding of the first antibody with its cognate epitope is detectably decreased in the presence of the second antibody compared to the binding of the first antibody in the absence of the second antibody. The alternative, where the binding of the second antibody to its epitope is also detectably decreased in the presence of the first antibody, can, but need not be the case. That is, a first antibody can inhibit the binding of a second antibody to its epitope without that second antibody inhibiting the binding of the first antibody to its respective epitope. However, where each antibody detectably inhibits the binding of the other antibody with its cognate epitope or ligand, whether to the same, greater, or lesser extent, the antibodies are said to “cross-compete” with each other for binding of their respective epitope(s). Both competing and cross-competing antibodies are encompassed by the present invention. Regardless of the mechanism by which such competition or cross-competition occurs (e.g., steric hindrance, conformational change, or binding to a common epitope, or portion thereof), the skilled artisan would appreciate, based upon the teachings provided herein, that such competing and/or cross-competing antibodies are encompassed and can be useful for the methods disclosed herein.

[0219] An antibody that “preferentially binds” or “specifically binds” (used interchangeably herein) to an epitope is a term well understood in the art, and methods to determine such specific or preferential binding are also well known in the art. A molecule is said to exhibit “specific binding” or “preferential binding” if it reacts or associates more frequently, and/or more rapidly, and/or with greater duration and/or with greater affinity with a particular cell or substance than it does with alternative cells or substances. An antibody “specifically binds” or “preferentially binds” to a target if it binds with greater affinity, and/or avidity, and/or more readily, and/or with greater duration than it binds to other substances. For example, an antibody that specifically or preferentially binds to a CFD epitope is an antibody that binds this epitope with greater affinity, and/or avidity, and/or more readily, and/or with greater duration than it binds to other CFD epitopes or non-CFD epitopes. It is also understood by reading this definition that, for example, an antibody (or moiety or epitope) that specifically or preferentially binds to a first target may or may not specifically or preferentially bind to a second target. As such, “specific binding” or “preferential binding” does not necessarily require (although it can include) exclusive binding. Generally, but not necessarily, reference to binding means preferential binding.

[0220] As used herein, the term “inhibit” refers to the reduction or decrease in an expected activity, such as a cellular activity. The reduction or decrease may be by at least 5%, 10%, 20%, 30%, 40%, 50%, 60%, 70%, 80%, 90%, or 100%, or any percentage that is within a range defined by any two of the aforementioned values, where a reduction or decrease of 100% indicates a complete inhibition and any lower percentage indicates a partial inhibition. The reduction or decrease of the expected activity may be observed in a direct or indirect way.

[0221] The term “block” or “disrupt” as used herein with regard to an antibody refers to the ability of an antibody to interfere with a biological process, including but not limited to activity of an enzyme, binding of two or more biological molecules (e.g. two or more proteins, peptides, nucleic acids, lipids, and the like), or advancement of a signaling cascade. Generally, interference with a biological process will involve the antibody binding to its target or an epitope thereof, thereby interfering with the normal function of said target, such as occluding an active site of the target, occluding another region of the target important for its function, or altering the localization and/or transport of the target. The blocking or disruption activity of an antibody may be quantified in terms of the reduction of the biological process in question relative to a control condition where the biological process is not disrupted. In other cases, the blocking or disruption activity of an antibody may be quantified in terms of a modulation in another biological process known to be associated with the target biological process, whether it be directly related or inversely related. In some embodiments, the blocking or disruption activity may cause a change of at least 5%, 10%, 20%, 30%, 40%, 50%, 60%, 70%, 80%, 90%, or 100%, or any percentage within a range defined by any two of the aforementioned values, relative to a control condition. In some embodiments provided herein, an interaction between Gal3 and a protein that forms amyloid aggregates is a biological process that can be disrupted by an anti-Gal3 antibody or binding fragment thereof. It is envisioned that the interaction between Gal3 and the protein that forms amyloid aggregates may or may not be a direct interaction, and the anti-Gal3 antibody or binding fragment thereof may interfere with some other aspect of the activity of Gal3 or the protein that forms amyloid aggregates.

[0222] As used herein, the term “antigen binding molecule” refers to a molecule that comprises an antigen binding portion that binds to an antigen and, optionally, a scaffold or framework portion that allows the antigen binding portion to adopt a conformation that promotes binding of the antigen binding portion or provides some additional properties to the antigen binding molecule. In some embodiments, the antigen is Gal3. In some embodiments, the antigen binding portion comprises at least one CDR from an antibody that binds to the antigen. In some embodiments, the antigen binding portion comprises all three CDRs from a heavy chain of an antibody that binds to the antigen or from a light chain of an antibody that binds to the antigen. In some embodiments, the antigen binding portion comprises all six CDRs from an antibody that binds to the antigen (three from the heavy chain and three from the light chain). In some embodiments, the antigen binding portion is an antibody fragment.

[0223] Non-limiting examples of antigen binding molecules include antibodies, antibody fragments (e.g., an antigen binding fragment of an antibody), antibody derivatives, and antibody analogs. Further specific examples include, but are not limited to, a single-chain variable fragment (scFv), a nanobody (e.g. VH domain of camelid heavy chain antibodies; VHH fragment, see Cortez-Retamozo et al., Cancer Research, Vol. 64:2853-57, 2004), a Fab fragment, a Fab′ fragment, a F(ab′)2 fragment, a Fv fragment, a Fd fragment, and a complementarity determining region (CDR) fragment. These molecules can be derived from any mammalian source, such as human, mouse, rat, rabbit, pig, dog, cat, horse, donkey, guinea pig, goat, or camelid. Antibody fragments may compete for binding of a target antigen with an intact antibody and the fragments may be produced by the modification of intact antibodies (e.g. enzymatic or chemical cleavage) or synthesized de novo using recombinant DNA technologies or peptide synthesis. The antigen binding molecule can comprise, for example, an alternative protein scaffold or artificial scaffold with grafted CDRs or CDR derivatives. Such scaffolds include, but are not limited to, antibody-derived scaffolds comprising mutations introduced to, for example, stabilize the three-dimensional structure of the antigen binding molecule as well as wholly synthetic scaffolds comprising, for example, a biocompatible polymer. See, for example, Korndorfer et al., 2003, Proteins: Structure, Function, and Bioinformatics, Volume 53, Issue 1:121-129 (2003); Roque et al., Biotechnol. Prog. 20:639-654 (2004). In addition, peptide antibody mimetics (“PAMs”) can be used, as well as scaffolds based on antibody mimetics utilizing fibronectin components as a scaffold.

[0224] An antigen binding molecule can also include a protein comprising one or more antibody fragments incorporated into a single polypeptide chain or into multiple polypeptide chains. For instance, antigen binding molecule can include, but are not limited to, a diabody (see, e.g., EP 404,097; WO 93/11161; and Hollinger et al., Proc. Natl. Acad. Sci. USA, Vol. 90:6444-6448, 1993); an intrabody; a domain antibody (single VL or VH domain or two or more VH domains joined by a peptide linker; see Ward et al., Nature, Vol. 341:544-546, 1989); a maxibody (2 scFvs fused to Fc region, see Fredericks et al., Protein Engineering, Design & Selection, Vol. 17:95-106, 2004 and Powers et al., Journal of Immunological Methods, Vol. 251:123-135, 2001); a triabody; a tetrabody; a minibody (scFv fused to CH3 domain; see Olafsen et al., Protein Eng Des Sel., Vol. 17:315-23, 2004); a peptibody (one or more peptides attached to an Fc region, see WO 00/24782); a linear antibody (a pair of tandem Fd segments (VH-CH1-VH-CH1) which, together with complementary light chain polypeptides, form a pair of antigen binding regions, see Zapata et al., Protein Eng., Vol. 8:1057-1062, 1995); a small modular immunopharmaceutical (see U.S. Patent Publication No. 20030133939); and immunoglobulin fusion proteins (e.g. IgG-scFv, IgG-Fab, 2scFv-IgG, 4scFv-IgG, VH-IgG, IgG-VH, and Fab-scFv-Fc).

[0225] In certain embodiments, an antigen binding molecule can have, for example, the structure of an immunoglobulin. An “immunoglobulin” is a tetrameric molecule, with each tetramer comprising two identical pairs of polypeptide chains, each pair having one “light” (about 25 kDa) and one “heavy” chain (about 50-70 kDa). The amino-terminal portion of each chain includes a variable region of about 100 to 110 or more amino acids primarily responsible for antigen recognition. The carboxy-terminal portion of each chain defines a constant region primarily responsible for effector function.

[0226] Unless otherwise specified, the complementarity defining regions disclosed herein follow the IMGT definition. In some embodiments, any of the CDRs disclosed herein can instead be interpreted by Kabat, Chothia, or other definitions accepted by those of skill in the art.

[0227] The term “humanized” as applies to a non-human (e.g. rodent or primate) antibodies are hybrid immunoglobulins, immunoglobulin chains or fragments thereof which contain minimal sequence derived from non-human immunoglobulin.

[0228] As used herein, the terms “treating” or “treatment” (and as well understood in the art) means an approach for obtaining beneficial or desired results in a subject's condition, including clinical results. Beneficial or desired clinical results can include, but are not limited to, alleviation or amelioration of one or more symptoms or conditions, diminishment of the extent of a disease, stabilizing (i.e., not worsening) the state of disease, prevention of a disease's transmission or spread, delaying or slowing of disease progression, amelioration or palliation of the disease state, diminishment of the reoccurrence of disease, and remission, whether partial or total and whether detectable or undetectable. “Treating” and “treatment” as used herein also include prophylactic treatment. Treatment methods comprise administering to a subject a therapeutically effective amount of an active agent. The administering step may consist of a single administration or may comprise a series of administrations. The compositions are administered to the subject in an amount and for a duration sufficient to treat the subject. The length of the treatment period depends on a variety of factors, such as the severity of the condition, the age and genetic profile of the subject, the concentration of active agent, the activity of the compositions used in the treatment, or a combination thereof. It will also be appreciated that the effective dosage of an agent used for the treatment or prophylaxis may increase or decrease over the course of a particular treatment or prophylaxis regime. Changes in dosage may result and become apparent by standard diagnostic assays known in the art. In some instances, chronic administration may be required.

[0229] The terms “effective amount” or “effective dose” as used herein have their plain and ordinary meaning as understood in light of the specification, and refer to that amount of a recited composition or compound that results in an observable designated effect. Actual dosage levels of active ingredients in an active composition of the presently disclosed subject matter can be varied so as to administer an amount of the active composition or compound that is effective to achieve the designated response for a particular subject and/or application. The selected dosage level can vary based upon a variety of factors including, but not limited to, the activity of the composition, formulation, route of administration, combination with other drugs or treatments, severity of the condition being treated, and the physical condition and prior medical history of the subject being treated. In some embodiments, a minimal dose is administered, and dose is escalated in the absence of dose-limiting toxicity to a minimally effective amount. Determination and adjustment of an effective dose, as well as evaluation of when and how to make such adjustments, are contemplated herein.

[0230] In some non-limiting embodiments, an effective amount or effective dose of a composition or compound may relate to the amount or dose that provides a significant, measurable, or sufficient therapeutic effect towards the treatment of any one or more of the diseases provided herein, such as a synucleinopathy, Parkinson's disease, dementia with Lewy bodies, multiple system atrophy, tauopathy, Alzheimer's disease, progressive supranuclear palsy, corticobasal degeneration, Pick's disease, TDP-43 proteopathy, amyotrophic lateral sclerosis, frontotemporal lobar degeneration, TTR amyloidosis (ATTR), cardiac amyloidosis, uromodulin-associated kidney disease, IAPP amyloidosis, SAA amyloidosis, rheumatoid arthritis, inflammatory arthritis, spondyloarthropathies, juvenile idiopathic arthritis, ankylosing spondylitis, psoriatic arthritis, inflammatory bowel disease, ulcerative colitis, Crohn's disease, celiac disease, vasculitis, sarcoidosis, familial Mediterranean fever, tumor necrosis factor receptor-associated periodic syndrome (TRAPS), cancer, aging promoted by amyloid aggregation, or any combination thereof. In some embodiments, the effective amount or effective dose of a composition or compound may treat, ameliorate, or prevent the progression of symptoms of any one or more of the diseases provided herein.

[0231] The term “administering” includes oral administration, topical contact, administration as a suppository, intravenous, intraperitoneal, intramuscular, intralesional, intrathecal, intranasal, or subcutaneous administration, or the implantation of a slow-release device, e.g., a mini-osmotic pump, to a subject. Administration is by any route, including parenteral and transmucosal (e.g., buccal, sublingual, palatal, gingival, nasal, vaginal, rectal, or transdermal). Parenteral administration includes, e.g., intravenous, intramuscular, intra-arteriole, intradermal, subcutaneous, intraperitoneal, intraventricular, and intracranial. Other modes of delivery include, but are not limited to, the use of liposomal formulations, intravenous infusion, transdermal patches, etc. By “co-administer” it is meant that a first compound described herein is administered at the same time, just prior to, or just after the administration of a second compound described herein.

[0232] As used herein, the term “therapeutic target” refers to a gene or gene product that, upon modulation of its activity (e.g., by modulation of expression, biological activity, and the like), can provide for modulation of the disease phenotype. As used throughout, “modulation” is meant to refer to an increase or a decrease in the indicated phenomenon (e.g., modulation of a biological activity refers to an increase in a biological activity or a decrease in a biological activity).

[0233] As used herein, “pharmaceutically acceptable” has its plain and ordinary meaning as understood in light of the specification and refers to carriers, excipients, and/or stabilizers that are nontoxic to the cell or mammal being exposed thereto at the dosages and concentrations employed or that have an acceptable level of toxicity. A “pharmaceutically acceptable” “diluent,” “excipient,” and/or “carrier” as used herein have their plain and ordinary meaning as understood in light of the specification and are intended to include any and all solvents, dispersion media, coatings, antibacterial and antifungal agents, isotonic and absorption delaying agents, and the like, compatible with administration to humans, cats, dogs, or other vertebrate hosts. Typically, a pharmaceutically acceptable diluent, excipient, and/or carrier is a diluent, excipient, and/or carrier approved by a regulatory agency of a Federal, a state government, or other regulatory agency, or listed in the U.S. Pharmacopeia or other generally recognized pharmacopeia for use in animals, including humans as well as non-human mammals, such as cats and dogs. The term diluent, excipient, and/or carrier can refer to a diluent, adjuvant, excipient, or vehicle with which the pharmaceutical formulation is administered. Such pharmaceutical diluent, excipient, and/or carriers can be sterile liquids, such as water and oils, including those of petroleum, animal, vegetable or synthetic origin. Water, saline solutions and aqueous dextrose and glycerol solutions can be employed as liquid diluents, excipients, and/or carriers, particularly for injectable solutions. Suitable pharmaceutical diluents and/or excipients include sugars, starch, glucose, fructose, lactose, sucrose, maltose, gelatin, malt, rice, flour, chalk, silica gel, sodium stearate, glycerol monostearate, talc, salts, sodium chloride, dried skim milk, glycerol, propylene, glycol, water, ethanol and the like. A non-limiting example of a physiologically acceptable carrier is an aqueous pH buffered solution. The physiologically acceptable carrier may also comprise one or more of the following: antioxidants, such as ascorbic acid, low molecular weight (less than about 10 residues) polypeptides, proteins, such as serum albumin, gelatin, immunoglobulins, hydrophilic polymers such as polyvinylpyrrolidone, amino acids, carbohydrates such as glucose, mannose, or dextrins, chelating agents such as EDTA, sugar alcohols such as glycerol, erythritol, threitol, arabitol, xylitol, ribitol, mannitol, sorbitol, galactitol, fucitol, iditol, inositol, isomalt, maltitol, or lactitol, salt-forming counterions such as sodium, and nonionic surfactants such as TWEEN®, polyethylene glycol (PEG), and PLURONICS®. The formulation, if desired, can also contain minor amounts of wetting, bulking, emulsifying agents, or pH buffering agents. These formulations can take the form of solutions, suspensions, emulsion, sustained release formulations and the like. The formulation should suit the mode of administration.

[0234] The term “pharmaceutically acceptable salts” has its plain and ordinary meaning as understood in light of the specification and includes relatively non-toxic, inorganic and organic acid, or base addition salts of compositions or excipients, including without limitation, analgesic agents, therapeutic agents, other materials, and the like. Examples of pharmaceutically acceptable salts include those derived from mineral acids, such as hydrochloric acid and sulfuric acid, and those derived from organic acids, such as ethanesulfonic acid, benzenesulfonic acid, p-toluenesulfonic acid, and the like. Examples of suitable inorganic bases for the formation of salts include the hydroxides, carbonates, and bicarbonates of ammonia, sodium, lithium, potassium, calcium, magnesium, aluminum, zinc, and the like. Salts may also be formed with suitable organic bases, including those that are non-toxic and strong enough to form such salts. For example, the class of such organic bases may include but are not limited to mono-, di-, and trialkylamines, including methylamine, dimethylamine, and triethylamine; mono-, di-, or trihydroxyalkylamines including mono-, di-, and triethanolamine; amino acids, including glycine, arginine and lysine; guanidine; N-methylglucosamine; N-methylglucamine; L-glutamine; N-methylpiperazine; morpholine; ethylenediamine; N-benzylphenethylamine; trihydroxymethyl aminoethane.

[0235] As used herein, a “carrier” refers to a compound, particle, solid, semi-solid, liquid, or diluent that facilitates the passage, delivery and/or incorporation of a compound to cells, tissues and/or bodily organs. For example, without limitation, a lipid nanoparticle (LNP) is a type of carrier that can encapsulate an oligonucleotide to thereby protect the oligonucleotide from degradation during passage through the bloodstream and/or to facilitate delivery to a desired organ, such as to the lungs.

[0236] As used herein, a “diluent” refers to an ingredient in a pharmaceutical composition that lacks pharmacological activity but may be pharmaceutically necessary or desirable. For example, a diluent may be used to increase the bulk of a potent drug whose mass is too small for manufacture and/or administration. It may also be a liquid for the dissolution of a drug to be administered by injection, ingestion or inhalation. A common form of diluent in the art is a buffered aqueous solution such as, without limitation, phosphate buffered saline that mimics the composition of human blood.

[0237] The term “excipient” has its ordinary meaning as understood in light of the specification, and refers to inert substances, compounds, or materials added to a pharmaceutical composition to provide, without limitation, bulk, consistency, stability, binding ability, lubrication, disintegrating ability etc., to the composition. Excipients with desirable properties include but are not limited to preservatives, adjuvants, stabilizers, solvents, buffers, diluents, solubilizing agents, detergents, surfactants, chelating agents, antioxidants, alcohols, ketones, aldehydes, ethylenediaminetetraacetic acid (EDTA), citric acid, salts, sodium chloride, sodium bicarbonate, sodium phosphate, sodium borate, sodium citrate, potassium chloride, potassium phosphate, magnesium sulfate sugars, dextrose, dextran, fructose, mannose, lactose, galactose, sucrose, sorbitol, cellulose, methyl cellulose, hydroxypropyl methyl cellulose (hypromellose), glycerin, polyvinyl alcohol, povidone, propylene glycol, serum, amino acids, polyethylene glycol, polysorbate 20, polysorbate 80, sodium deoxycholate, sodium taurodeoxycholate, magnesium stearate, octylphenol ethoxylate, benzethonium chloride, thimerosal, gelatin, esters, ethers, 2-phenoxyethanol, urea, or vitamins, or any combination thereof. The amount of the excipient may be found in a pharmaceutical composition at a percentage of 0%, 0.1%, 0.2%, 0.3%, 0.4%, 0.5%, 0.6%, 0.7%, 0.8%, 0.9%, 1%, 2%, 3%, 4%, 5%, 6%, 7%, 8%, 9%, 10%, 20%, 30%, 40%, 50%, 60%, 70%, 80%, 90%, 95%, 100% w/w or any percentage by weight in a range defined by any two of the aforementioned numbers.

[0238] Additional excipients with desirable properties include but are not limited to preservatives, adjuvants, stabilizers, solvents, buffers, diluents, solubilizing agents, detergents, surfactants, chelating agents, antioxidants, alcohols, ketones, aldehydes, ethylenediaminetetraacetic acid (EDTA), tris(hydroxymethyl)aminomethane (Tris), citric acid, ascorbic acid, acetic acid, salts, phosphates, citrates, acetates, succinates, chlorides, bicarbonates, borates, sulfates, sodium chloride, sodium bicarbonate, sodium phosphate, sodium borate, sodium citrate, potassium chloride, potassium phosphate, magnesium sulfate sugars, dextrose, dextran 40, fructose, mannose, lactose, trehalose, galactose, sucrose, sorbitol, mannitol, cellulose, serum, amino acids, alanine, arginine, asparagine, aspartic acid, cysteine, glutamine, glutamic acid, glycine, histidine, isoleucine, leucine, lysine, methionine, phenylalanine, proline, serine, threonine, tryptophan, tyrosine, valine, polysorbate 20, polysorbate 40, polysorbate, 60, polysorbate 80, poloxamer, poloxamer 188, sodium deoxycholate, sodium taurodeoxycholate, magnesium stearate, octylphenol ethoxylate, benzethonium chloride, thimerosal, gelatin, esters, ethers, 2-phenoxyethanol, urea, or vitamins, or any combination thereof. Some excipients may be in residual amounts or contaminants from the process of manufacturing, including but not limited to serum, albumin, ovalbumin, antibiotics, inactivating agents, formaldehyde, glutaraldehyde, β-propiolactone, gelatin, cell debris, nucleic acids, peptides, amino acids, or growth medium components or any combination thereof. The amount of the excipient may be found in the formulation at a percentage that is at least 0%, 0.1%, 0.2%, 0.3%, 0.4%, 0.5%, 0.6%, 0.7%, 0.8%, 0.9%, 1%, 2%, 3%, 4%, 5%, 6%, 7%, 8%, 9%, 10%, 20%, 30%, 40%, 50%, 60%, 70%, 80%, 90%, 95%, 100% w/w or any percentage by weight in a range defined by any two of the aforementioned numbers.

[0239] The term “purity” of any given substance, compound, or material as used herein refers to the actual abundance of the substance, compound, or material relative to the expected abundance. For example, the substance, compound, or material may be at least 80, 85, 90, 91, 92, 93, 94, 95, 96, 97, 98, 99, or 100% pure, including all decimals in between. Purity may be affected by unwanted impurities, including but not limited to side products, isomers, enantiomers, degradation products, solvent, carrier, vehicle, or contaminants, or any combination thereof. Purity can be measured technologies including but not limited to chromatography, liquid chromatography, gas chromatography, spectroscopy, UV-visible spectrometry, infrared spectrometry, mass spectrometry, nuclear magnetic resonance, gravimetry, or titration, or any combination thereof.

[0240] As used herein, the term “standard of care”, “best practice” and “standard therapy” refers to the treatment that is accepted by medical practitioners to be an appropriate, proper, effective, and/or widely used treatment for a certain disease. The standard of care of a certain disease depends on many different factors, including the biological effect of treatment, region or location within the body, patient status (e.g. age, weight, gender, hereditary risks, other disabilities, secondary conditions), toxicity, metabolism, bioaccumulation, therapeutic index, dosage, and other factors known in the art. Determining a standard of care for a disease is also dependent on establishing safety and efficacy in clinical trials as standardized by regulatory bodies such as the US Food and Drug Administration, International Council for Harmonisation, Health Canada, European Medicines Agency, Therapeutics Goods Administration, Central Drugs Standard Control Organization, National Medical Products Administration, Pharmaceuticals and Medical Devices Agency, Ministry of Food and Drug Safety, and the World Health Organization. The standard of care for a disease may include but is not limited to surgery, radiation, chemotherapy, targeted therapy, or immunotherapy.

[0241] As used herein, the term “proteopathy” refers to a disease which is caused by abnormal folding or accumulation of proteins. An abnormal protein may gain a toxic function, or lose their normal function. It is possible that misfolded proteins can induce the misfolding of otherwise normally folded proteins, resulting in an amplification of the disease (e.g. prion disease). A proteopathy may be an amyloid proteopathy caused by pathogenic accumulation of protein amyloids. Some non-limiting examples of proteopathies include Alzheimer's disease, cerebral β-amyloid angiopathy, retinal ganglion cell degeneration in glaucoma, Parkinson's disease, dementia with Lewy bodies, multiple system atrophy, synucleinopathy, Pick's disease, corticobasal degeneration, tauopathy, progressive supranuclear palsy, TDP-43 proteopathy, amyotrophic lateral sclerosis, frontotemporal lobar degeneration, Huntington's disease, dentatorubropallidoluysian atrophy, spinal and bulbal muscular atrophy, spinocerebellar ataxia, fragile X syndrome, Baratela-Scott syndrome, Freidrich's ataxia, myotonic dystrophy, Alexander disease, familial British dementia, familial Danish dementia, Palizaeus-Merzbacher disease, seipinopathy, SAA amyloidosis, AA (secondary) amyloidosis, type II diabetes, fibrinogen amyloidosis, dialysis amyloidosis, inclusion body myositis/myopathy, familial amyloidotic neuropathy, senile systemic amyloidosis, serpinopathy, TTR amyloidosis, cardiac amyloidosis, cardiac atrial amyloidosis, uromodulin-associated kidney disease, IAPP amyloidosis, rheumatoid arthritis, inflammatory arthritis, spondyloarthropathies, juvenile idiopathic arthritis, ankylosing spondylitis, psoriatic arthritis, inflammatory bowel disease, ulcerative colitis, Crohn's disease, celiac disease, vasculitis, sarcoidosis, familial Mediterranean fever, tumor necrosis factor receptor-associated periodic syndrome (TRAPS), pituitary prolactinoma, insulin amyloidosis, corneal lactoferrin amyloidosis, pulmonary alveolar proteinosis, seminal vesicle amyloid, cutaneous lichen amyloidosis, Mallory bodies, odontogenic (Pindborg) tumor amyloid, cancer, aging promoted by amyloid aggregation, or any disease caused by the misfolding or aggregation of proteins, or otherwise known by a person skilled in the art. The term “proteinopathy” may be used interchangeably with “proteopathy” as understood in the art.

[0242] As used herein, the term “amyloid” refers to fibrillar protein structures composed of stacked beta-sheet configurations. These fibrillar structures may be formed due to misfolding of proteins that have a normal or non-pathogenic structure, although there are also protein amyloids that are naturally occurring and/or non-pathogenic. Aggregation of various naturally occurring proteins have been associated with several pathogenic diseases. The accumulation of these fibrillar deposits can interfere with normal cellular structure and function, and can also induce additional protein molecules into aggregate forms. Histopathological identification of amyloid formation can be done with the use of dyes, such as Congo Red, which preferentially intercalate between the stacked beta-sheets. As used here, the term “amyloid aggregation” refers to the formation of these protein amyloids, such as in a cell and which may result in a pathogenic proteopathy.

[0243] As used herein, an “aggregation associated disease” refers to a disease that is associated with the aggregation of one or more naturally occurring proteins. Aggregation associated diseases include, but are not limited to, Alzheimer's disease (AD), cerebral amyloid angiopathy, frontotemporal lobar degeneration (FTLD), Pick's disease (PiD), progressive supranuclear palsy (PSP), corticobasal degeneration (CBD), global glial tauopathy (GGT), Lewy body disease (LBD), Parkinson's disease (PD), diffuse Lewy body disease (DLBD), Lewy body variant of Alzheimer's disease (LBV), synucleinopathies, multiple system atrophy (MSA), cardiovascular disease, atherosclerosis, coronary heart disease, stroke, TIA, peripheral arterial disease, aortic disease, brain disease, kidney disease, eye disease, high-intracellular cholesteryl ester/cholesterol accumulation, inflammation, Familial encephalopathy with neuroserpin inclusion bodies (FENIB), insulin-derived amyloidosis (LIDA), intracerebral hemorrhage (ICH), cognitive impairment, amyotrophic lateral sclerosis (ALS), Prion diseases, transmissible spongiform encephalopathy (TSE), Creutzfeldt-Jakob disease (CJD), fatal familial insomnia, Gerstmann-Straussler-Scheinker disease, myopathies, sarcopenia, idiopathic inflammatory myopathies (IIM), sporadic inclusion body myositis (sIBM), dermatomyositis (DM), polymyositis (PM), necrotizing autoimmune myopathy (NAM), transthyretin amyloidosis (ATTR), transthyretin amyloid cardiomyopathy (ATTR-CM), phenylketonuria (PKU), or human systemic amyloid disease.

[0244] Amyloid Beta (Aβ 40 and 42)—In AD, a the most common type of dementia, aggregation of Aβ peptides and formation of senile plaques is a central component and believed to occur early in the pathogenesis. Aβ peptides are cleaved from the amyloid precursor protein (APP) and aggregate into various forms, including oligomers, protofibrils and amyloid fibrils. Large and insoluble Aβ fibrils assemble into amyloid plaques, while Aβ oligomers are soluble and toxic to neurons. Cerebral amyloid angiopathy (CAA) is characterized by the deposition of Aβ in cerebral blood vessels and is believed to be a major contributor of cerebrovascular pathologies in AD.

[0245] Phospho Tau and tauopathies—Hyperphosphorylation of the microtubule-associated protein tau plays a key role in the pathogenesis of Alzheimer disease (AD) and other tauopathies, including corticobasal degeneration, post-encephalitic parkinsonism and argyrophilic grain disease. Tau hyperphosphorylation leads to loss of function, gain of toxicity and its aggregation, forming neurofibrillary tangles NFTs). Mutations in the gene cause familial forms of frontotemporal lobar degeneration (FTLD) including Pick's disease (PiD), progressive supranuclear palsy (PSP), corticobasal degeneration (CBD), and globular glial tauopathy (GGT).

[0246] Alpha-synuclein—Lewy body disease, multiple system atrophy: Alpha-synuclein is normally involved in trafficking of synaptic vesicles (SVs) in brain but its aggregation results in intraneuronal deposits called Lewy bodies (LBs) and extracellular Lewy neurites (LNs). Lewy bodies (LBs) is the pathological hallmark of Lewy body disease, which includes Parkinson's disease (PD), diffuse Lewy body disease (DLBD), and Lewy body variant of Alzheimer's disease (LBV). Lewy body dementia (LBD), which includes Dementia with Lewy bodies and Parkinson's disease dementia, is one of the most common types of dementia, after Alzheimer's disease. Most cases of synucleinopathies are sporadic however familial variants of alpha-synuclein leads to early onsets of PD. In multiple system atrophy (MSA), alpha-synuclein inclusions are mainly found in oligodendrocytes. See de Oliveira G A P, Silva J L. Alpha-synuclein stepwise aggregation reveals features of an early onset mutation in Parkinson's disease. Commun Biol. 2019 Oct. 11; 2:374; Schweighauser M, Shi Y, Tarutani A, Kametani F, Murzin A G, Ghetti B, Matsubara T, Tomita T, Ando T, Hasegawa K, Murayama S, Yoshida M, Hasegawa M, Scheres S H W, Goedert M. Structures of α-synuclein filaments from multiple system atrophy. Nature. 2020 September; 585(7825):464-469.

[0247] APOE2, E3, E4-AD: Apolipoprotein E (APOE) is an important lipid transporter with isoform-dependent effects on its lipidation and aggregation. APOE and its lipoprotein receptors in addition mediates Aβ transport. APOE4 allele, which is the strongest genetic risk factor for late onset Alzheimer's Disease, is less lipidated than APOE3 and APOE2, the latter being protective in Alzheimer's Disease. APOE4 appears to strongly affect oligomeric Amyloidβ aggregation and stabilization, thereby promoting Amyloidβ fibril formation in Alzheimer's Disease brains, and altering its lipidation state decreases Amyloids plaque burden. See Husain M A, Laurent B, Plourde M. APOE and Alzheimer's Disease: From Lipid Transport to Physiopathology and Therapeutics. Front Neurosci. 2021 Feb. 17; 15:630502; Parhizkar S, Holtzman D M. APOE mediated neuroinflammation and neurodegeneration in Alzheimer's disease. Semin Immunol. 2022 Feb. 26; 101594.

[0248] Cholesterol—atherosclerosis, cardiovascular disease and Alzheimer's disease: In blood, cholesterol is carried on two types of lipoproteins, of which low-density lipoprotein (LDL) contributes to cholesterol aggregation and build-up of atherosclerotic plaques in the arteries. Arteries then can become thick and stiff (arteriosclerosis) limiting blood flow, blood clots can form and arteries can even rupture. Atherosclerosis may lead to hypertension and cardiovascular disease, including coronary heart disease, strokes and TIAs, peripheral arterial disease, and aortic disease, and lead to damage in other organs including brain, kidneys and eyes. In AD brains, cholesterol in cell membranes, accumulated in so called lipid rafts and associated free cholesterol, acts as seed for Aβ aggregation and promotes formation of fibrils. See Abdullah S M, Defina L F, Leonard D, Barlow C E, Radford N B, Willis B L, Rohatgi A, McGuire D K, de Lemos J A, Grundy S M, Berry J D, Khera A. Long-Term Association of Low-Density Lipoprotein Cholesterol With Cardiovascular Mortality in Individuals at Low 10-Year Risk of Atherosclerotic Cardiovascular Disease Circulation. 2018 Nov. 20; 138(21):2315-2325; Habchi J, Chia S, Galvagnion C, Michaels T C T, Bellaiche M M J, Ruggeri F S, Sanguanini M, Idini I, Kumita J R, Sparr E, Linse S, Dobson C M, Knowles T P J, Vendruscolo M. Cholesterol catalyses Aβ42 aggregation through a heterogeneous nucleation pathway in the presence of lipid membranes. Nat Chem. 2018 June; 10(6):673-683; Hashemi M, Banerjee S, Lyubchenko Y L. Free Cholesterol Accelerates Aβ Self-Assembly on Membranes at Physiological Concentration. Int J Mol Sci. 2022 Mar. 3; 23(5):2803; Gellermann G P, Appel T R, Tannert A, Radestock A, Hortschansky P, Schroeckh V, Leisner C, Liitkepohl T, Shtrasburg S, Rocken C, Pras M, Linke R P, Diekmann S, Fandrich M. Raft lipids as common components of human extracellular amyloid fibrils. Proc Natl Acad Sci USA. 2005 May 3; 102(18):6297-302.

[0249] Cholesteryl (Co-Esteryl)—atherosclerosis, cardiovascular disease: Cholesteryl ester is the inactive and more hydrophobic form of cholesterol, in which cholesterol is esterified with fatty acids in order to be transported to target organs. It is therefore the major form of cholesterol in lipoproteins. At atherosclerotic plaques, aggregated LDL and cholesteryl esters are taken up by LDLr-related protein (LRP1) into vascular smooth muscle cells, endothelial cells and macrophages (rendering then foam macrophages), resulting in high-intracellular cholesteryl ester/cholesterol accumulation and inflammation. Llorente-Cortés V, Otero-Viñas M, Camino-López S, Costales P, Badimon L. Cholesteryl Esters of Aggregated LDL Are Internalized by Selective Uptake in Human Vascular Smooth Muscle Cells. Arterioscler Thromb Vasc Biol. 2006 January; 26(1):117-23.

[0250] Neuroserpin—FENIB: The serine protease inhibitor neuroserpin is an inhibitory serpin mainly expressed in brain, with physiological functions in synaptic development and plasticity. The structure of neuroserpin is essential for its function and leads to polymerization and the formation of inclusion bodies, the hallmark of serpinopathies. Familial encephalopathy with neuroserpin inclusion bodies (FENIB), is a rare genetic degenerative disorder affecting the brain and spinal cord, with clinical manifestations including dementia, myoclonic seizures and epilepsy. See D'Acunto E, Fra A, Visentin C, Manno M, Ricagno S, Galliciotti G, Miranda E. Neuroserpin: structure, function, physiology and pathology. Cell Mol Life Sci. 2021 October; 78(19-20):6409-6430.

[0251] Insulin—LIDA: With chronic administration of insulin, at the site of injection aggregation of insulin into insoluble fibrils can lead to localized insulin-derived amyloidosis (LIDA), a cutaneous lesion. See Ansari A M, Osmani L, Matsangos A E, Li Q K. Current insight in the localized insulin-derived amyloidosis (LIDA): clinico-pathological characteristics and differential diagnosis. Pathol Res Pract. 2017 October; 213(10):1237-1241; Das A, Shah M, Saraogi I. Molecular Aspects of Insulin Aggregation and Various Therapeutic Interventions. ACS Bio & Med Chem Au, 2022 January, 10.1021/acsbiomedchemau.1c00054.

[0252] Cystatin C—CAA, possibly ALS: Cystatin C is a cysteine protease inhibitor that controls lysosomal activities and extracellular proteases, and with aggregation, Cystatin C seem to lose its function. It is found to be aggregated and is deposited on the vessel walls along with Aβ peptide in cerebral amyloid angiopathy (CAA), with main clinical manifestations being intracerebral hemorrhage (ICH) and cognitive impairment. A mutation in Cystatin C increases its aggregation properties in inherited CAA. Cystatin C is present in Bunina bodies, the inclusion bodies found in the motor neurons of amyotrophic lateral sclerosis (ALS) spinal cords. See Sheikh A M, Wada Y, Tabassum S, Inagaki S, Mitaki S, Yano S, Nagai A. Aggregation of Cystatin C Changes Its Inhibitory Functions on Protease Activities and Amyloid β Fibril Formation. Int J Mol Sci. 2021 Sep. 7; 22(18):9682; March M E, Gutierrez-Uzquiza A, Snorradottir A O, Matsuoka L S, Balvis N F, Gestsson T, Nguyen K, Sleiman P M A, Kao C, Isaksson H J, Bragason B T, Olafsson E, Palsdottir A, Hakonarson H. NAC blocks Cystatin C amyloid complex aggregation in a cell system and in skin of HCCAA patients. Nat Commun. 2021 Mar. 23; 12(1):1827; Wada Y, Nagai A, Sheikh A M, Onoda K, Terashima M, Shiota Y, Araki A, Yamaguchi S. Co-localization of cystatin C and prosaposin in cultured neurons and in anterior horn neurons with amyotrophic lateral sclerosis. J Neurol Sci. 2018 Jan. 15; 384:67-74.

[0253] Prion protein—prion diseases including CJD: Prion diseases, or transmissible spongiform encephalopathy (TSE), are caused by misfolding followed by aggregation and accumulation in neuronal cells of the prion protein, PrP, and eventually spongiform degeneration is seen. It is highly infectious in nature and most cases are sporadic but genetic forms consists of familial Creutzfeldt-Jakob disease (CJD), fatal familial insomnia, and Gerstmann-Straussler-Scheinker disease.

[0254] Myostatin—myopathies, sarcopenia and myositis: Myostatin negatively regulates muscle growth and has an impact on molecular regulators of atrophy and hypertrophy in different myopathies and sarcopenia. Myostatin is upregulated in idiopathic inflammatory myopathies (IIM). IIM, or myositis, are autoimmune diseases characterized by muscle weakness and includes 5 subtypes. In sporadic inclusion body myositis (sIBM), myostatin aggregates and accumulates with A3, and secretion of misfolded myostatin is impaired.

[0255] Transthyretin—transthyretin amyloidosis, heart and kidney diseases and preeclampsia: The tetrameric thyroxine transport protein transthyretin (TTR) forms soluble oligomers and amyloid aggregates when dissociated into monomers. The aggregation of TTR is the cause of transthyretin amyloidosis (ATTR), a systemic amyloidosis, that can lead to heart and kidney diseases and preeclampsia. Transthyretin amyloid cardiomyopathy (ATTR-CM) is a cause of heart failure.

[0256] Phenylalanine—Phenylketonuria: Phenylketonuria (PKU) is an inherited metabolic disease characterized by abnormally high concentrations of the essential amino acid L-phenylalanine in blood and brain and that can lead to chronic kidney disease. The multitude of health problems associated with PKU includes disorders associated with it including anemia, rickets, atopic dermatitis, coronary heart disease, diabetes mellitus and arthritis. Formation of phenylalanine fibrils can initiate aggregation of proteins under physiological conditions, and the resultant fibrils can cause severe hemolysis.

[0257] NFL—motor neuron degeneration: Mutant neurofilament (NF) proteins are characterized by defective transport or assembly and NF aggregation or accumulation, leading to atrophy and motor neuron degeneration. Mutations in neurofilament light (NFL) subunit cause Charcot-Marie-Tooth disease, the most common inherited peripheral neuropathy, and NF mutations have been found in patients with early-onset PD, AD and sporadic Amyotrophic Lateral Sclerosis (ALS). In ALS, aggregation of NFL may also promote aggregation of wildly expressed proteins that are destabilized by missense mutations.

[0258] Fibrin—Cerebrovascular damage, AD, CAA: Iron-induced free radicals can generate thrombolysis-resistant fibrin-like polymers. These fibrin fibers can irreversibly trap red blood cells (RBCs) and in this way induce chronic hypoxia in the brain and cause other cerebrovascular damage. Insoluble deposits of fibrin and Aβ aggregates are present in AD brains and neurovasculature, leading to CAA and blood clots.

[0259] Lysozyme—human systemic amyloid disease: Lysozyme, like many other well-folded globular proteins, under stressful conditions produces nanoscale oligomer assembly and amyloid-like fibrillar aggregates. With engaging Raman microscopy, we made a critical structural analysis of oligomer and other assembly structures of lysozyme obtained from hen egg white and provided a quantitative estimation of a protein secondary structure in different states of its fibrillation. The accumulation in vital organs of amyloid fibrils made of mutational variants of lysozyme (HuL) is associated with a human systemic amyloid disease.

[0260] Complement protein C3 and C9 aggregation: The complement cascade is a critical effector mechanism of the innate immune system that contributes to the rapid clearance of pathogens and dead or dying cells, as well as contributing to the extent and limit of the inflammatory immune response. It has been demonstrate the ubiquitous, spatial and specific enrichment of C9 in amyloid deposits irrespective of amyloid-, organ- or tissue type. Our findings lend support to the hypothesis that amyloidosis might activate the complement cascade, which could lead to the formation of the membrane attack complex and cell death.

[0261] Crystallins: Cataracts are a common protein misfolding disease of the ocular lens, which affects approximately 50% of the population over the age of 65. This disease results from accumulated damage to lens Crystallin proteins, which destabilizes their folds and causes them to aggregate, resulting in the blurring of vision. Currently, the only treatment for cataracts is invasive surgical extraction that is carried out in the advanced stages of the disease. As a result, there is much interest in understanding the cause of cataracts and the mechanism by which they form. Kate L. Moreau, Jonathan A. King. Protein Misfolding and Aggregation in Cataract Disease and Prospects for Prevention. Trends Mol Med. 2012 May; 18(5): 273-282.

[0262] Atria Natriuretic Peptide: Atrial Natriuretic Peptide (ANP)-containing amyloid is frequently found in the elderly heart. that b-ANP plays a crucial role in ANP amyloid deposition under physio pathological congestive heart failure (CHF) conditions. It is also indicated that early isolated atrial amyloidosis (IAA)-related ANP deposition may occur in CHF and suggest that these latter patients should be monitored for the development of cardiac amyloidosis. Millucci L, Paccagnini E, Ghezzi L, Bernardini G, Braconi D, Laschi M, et al. (2011) Different Factors Affecting Human ANP Amyloid Aggregation and Their Implications in Congestive Heart Failure. PLoS ONE 6(7): e21870.

[0263] Calcitonin: Calcitonin is a hormone made by thyroid, a small, butterfly-shaped gland located near the throat. Calcitonin helps control how the body uses calcium. Calcitonin is a type of tumor marker. Tumor markers are substances made by cancer cells or by normal cells in response to cancer in the body. Calcitonin aggregation is Association with medullary carcinoma of the thyroid (MTC), and also limits its clinical application. Belfiore, M., Cariati, I., Matteucci, A. et al. Calcitonin native prefibrillar oligomers but not monomers induce membrane damage that triggers NMDA-mediated Ca2+-influx, LTP impairment and neurotoxicity. Sci Rep 9, 5144 (2019).

[0264] 21 B-type natriuretic peptide (BNP): BNP and its N-terminal fragment (NT-proBNP) are released from ventricular cardiomyocytes in response to an increase in ventricular wall stress and to myocardial ischemia. Both BNP and NT-proBNP have proven to be reliable diagnostic and prognostic biomarkers in patients with heart failure. Weber M, Mitrovic V, Hamm C. B-type natriuretic peptide and N-terminal pro-B-type natriuretic peptide—Diagnostic role in stable coronary artery disease. Exp Clin Cardiol. 2006 Summer; 11(2):99-101.

[0265] Serum amyloid A (SAA): Serum amyloid A (SAA) protein is synthesized in the liver in normal conditions, but in AA amyloidosis, under the stimulus of AEF, SAA protein aggregates into fibrils and is deposited in the liver. Jayaraman S., Gantz D. L., Haupt C., Gursky O. Serum amyloid A forms stable oligomers that disrupt vesicles at lysosomal pH and contribute to the pathogenesis of reactive amyloidosis. Proc Natl Acad Sci USA. 2017; 114: E6507-E6515.

[0266] Islet amyloid Polypeptide (IAPP): Diabetes mellitus is a metabolic disease affecting an estimated 383 million people worldwide, of which about 90% suffer from T2D. T2D features an adult onset of the disease and its progression is characterized by pancreatic β-cell death, causing reduced insulin secretion. The disease mechanism of T2D is largely unknown and there is no known cure. Given the complex nature of the disease, the cause of 0-cell death is likely the result of interplay of many factors. For instance, since amyloid aggregates of IAPP (a.k.a. amylin) in pancreas are found in approximately 90% of patients upon postmortem examination, many research efforts focused on understanding IAPP aggregation and its association with the disease. Nedumpully-Govindan, P., Ding, F. Inhibition of IAPP aggregation by insulin depends on the insulin oligomeric state regulated by zinc ion concentration. Sci Rep 5, 8240 (2015).

[0267] As used herein, the term “technetium pyrophosphate (99mTc-PYP) scintigraphy” is a diagnostic method involving the use of a technetium radiotracer that bind to and can be used to localize accumulated amyloid deposits by gamma ray detection. One non-limiting example is the detection of cardiomyopathy caused by TTR amyloidosis. Whereas scintigraphy is two-dimensional, the same process can be used in 99mTc-PYP single-photon emission computed tomography (SPECT) for a three-dimensional scan.

[0268] The term “% w/w” or “% wt/wt” means a percentage expressed in terms of the weight of the ingredient or agent over the total weight of the composition multiplied by 100.

[0269] It is understood that an antibody with an antibody name described herein can be referred using a shortened version of the antibody name, as long as there are no conflicts with another antibody described herein. For example, F846C.1B2 can also be referred to as 846C.1B2, or 846.1B2. This can also refer to fragments of the antibody (e.g., with the same 1, 3, or 6 CDRs).

### Exemplary Methods of Use

[0270] Any of the anti-Gal3 antibodies or binding fragments thereof, or proteins, disclosed herein may be used in methods as provided herein.

[0271] Some aspects of the present disclosure are directed towards a method of promoting amyloid aggregation and/or oligomerization of a protein, comprising contacting the protein with Gal3, wherein Gal3 promotes amyloid aggregation and/or oligomerization of the protein.

[0272] FIG. 1 is a flow chart depicting some embodiments of methods of promoting amyloid aggregation and/or oligomerization of a protein.

[0273] In some embodiments are disclosed methods of promoting amyloid aggregation and/or oligomerization of a protein 100. In some embodiments, the methods comprise contacting the protein with Gal3 101. In some embodiments, Gal3 binding 102 promotes amyloid aggregation and/or oligomerization of the protein 103. In some embodiments, the protein is contacted with Gal3 in an aqueous solution. In some embodiments, Gal3 promotes amyloid aggregation and/or oligomerization of the protein on the order of 0.5, 1, 2, 3, 4, 5, 6, 7, 8, 9, 10, 11, 12, 13, 14, 15, 16, 17, 18, 19, 20, 21, 22, 23, or 24 hours. In some embodiments, the protein comprises α-synuclein, tau protein, TDP-43, transthyretin, uromodulin, islet amyloid polypeptide (IAPP), serum amyloid A (SAA), p53, apolipoprotein E (APOE), APOE-4, prion protein, fibrin, or neurofilament light (NFL), CRP, SUMO, light chain, platelet-derived growth factor receptor (PDGFR), melanoma cell adhesion molecule (MCAM), complement proteins C3 and/or C9, lysozyme, insulin, native haemoglobin (Hb), glycosylated haemoglobin (HbAIC), phenylalanine (Phe), glutamine (Gln), cholesteryl (co-esteryl), cholesterol, neuroserpin, Crystallin AA and/or Crystallin AB, cystatin-C, or myostatin propeptide, or any combination thereof. In some embodiments, the tau protein is 4R tau and/or phosphorylated tau (phospho tau). In some embodiments, the phosphorylated tau is phospho-tau (S396). In some embodiments, the phosphorylated tau forms trimers, tetramers, or higher order oligomers when contacted with Gal3. In some embodiments, amyloid aggregation and/or oligomerization of the tau protein is achieved more rapidly compared to spontaneous aggregation and/or oligomerization of tau protein alone, or aggregation and/or oligomerization of tau protein when mixed with heparin and/or arachnoid acid. In some embodiments, amyloid aggregation and/or oligomerization of the tau protein is achieved more rapidly compared to aggregation and/or oligomerization of tau protein when mixed with heparin and/or arachnoid acid at 37° C. or about 37° C. In some embodiments, amyloid aggregation and/or oligomerization of the tau protein is achieved with no more than 0.5, 1, 2, 3, 4, 5, 6, 7, 8, 9, 10, 11, 12, 13, 14, 15, 16, 17, 18, 19, 20, 21, 22, 23, or 24 hours of contacting the tau protein with Gal3. This aggregation and/or oligomerization of tau protein by Gal3 occurs faster than previous methods, such as those involving the use of heparin and/or arachnoid acid. In some embodiments, the protein comprises APOE, prion protein, or NFL, or any combination thereof. In some embodiments, the APOE is APO-E4. In some embodiments, this positive formation of the aggregates or oligomers allows for a model for testing and/or confirming of molecules that can reverse and/or inhibit the formation of these oligomers/aggregates.

[0274] In some embodiments, the protein is contacted with Gal3 at a temperature of about 10, 11, 12, 13, 14, 15, 16, 17, 18, 19, 20, 21, 22, 23, 24, 25, 26, 27, 28, 29, 30, 31, 32, 33, 34, 35, 36, 37, 38, 39, 40, 41, 42, 43, 44, or 45° C., or any temperature within a range defined by any two of the aforementioned temperatures. In some embodiments, the protein is contacted with Gal3 at body temperature, 37° C., or about 37° C. In some embodiments, the protein is contacted with Gal3 below body temperature, below 37° C., or below about 37° C. In some embodiments, the protein is contacted with Gal3 at room temperature or about room temperature. In some embodiments, the protein is contacted with Gal3 at a temperature of about 18, 19, 20, 21, 22, 23, or 24° C., or any temperature within a range defined by any two of the aforementioned temperatures.

[0275] In some embodiments of the methods of promoting amyloid aggregation and/or oligomerization of a protein using Gal3, the protein and Gal3 are combined and incubated in an aqueous solution. In some embodiments, the protein is provided at 10, 20, 30, 40, 50, 60, 70, 80, 90, 100, 110, 120, 130, 140, 150, 160, 170, 180, 190, 200, 250, 300, 350, 400, 450, 500, 550, 600, 650, 700, 750, 800, 850, 900, 950, or 1000 μg/mL, or any concentration within a range defined by any two of the aforementioned concentrations. In some embodiments, Gal3 is provided at 10, 20, 30, 40, 50, 60, 70, 80, 90, 100, 110, 120, 130, 140, 150, 160, 170, 180, 190, 200, 250, 300, 350, 400, 450, 500, 550, 600, 650, 700, 750, 800, 850, 900, 950, or 1000 μg/mL, or any concentration within a range defined by any two of the aforementioned concentrations. In some embodiments, the protein and Gal3 are provided at the same, about the same, or similar concentrations, where similar concentrations may mean concentrations that are or are about 1%, 2%, 3%, 4%, 5%, 6%, 7%, 8%, 9%, 10%, 15%, 20%, 25%, 30%, 35%, 40%, 45%, 50%, 55%, 60%, 65%, 70%, 75%, 80%, 85%, 90%, 95%, or 100% within each other. In some embodiments, the protein and/or Gal3 is provided at 50, 60, 70, 80, 90, 100, 110, 120, 130, 140, or 150 μg/mL, or any concentration within a range defined by any two of the aforementioned concentrations. In some embodiments, the protein and/or Gal3 is provided at 100 μg/mL or about 100 μg/mL. In some embodiments, the aqueous solution is any solution that is compatible with proteins (e.g., any one or more of isotonic, mimicking biological conditions, buffered, minimizing protein denaturation or degradation, or maintaining proper protein folding). In some embodiments, the aqueous solution is saline or sodium phosphate buffer, optionally 10 mM sodium phosphate buffer. In some embodiments, the protein and Gal3 are first prepared in solutions that are compatible with proteins and mixed together to arrive at the aqueous solution. In some embodiments, the aqueous solution may be diluted, such as to adjust the concentration of components in the aqueous solution (e.g. buffers) or to adjust the concentration of the protein and/or Gal3. In some embodiments, the protein and Gal3 are combined and incubated for a period of time sufficient to promote amyloid aggregation and/or oligomerization of the protein. In some embodiments, the protein and Gal3 are combined and incubated for a period of time that is or is about 0, 0.5, 1, 2, 3, 4, 5, 6, 7, 8, 9, 10, 11, 12, 13, 14, 15, 16, 17, 18, 19, 20, 21, 22, 23, 24, 25, 26, 27, 28, 29, 30, 31, 32, 33, 34, 35, 36, 37, 38, 39, 40, 42, 43, 44, 45, 46, 47, or 48 hours, or any period of time within a range defined by any two of the aforementioned periods of time. In some embodiments, the protein and Gal3 are combined and incubated at a temperature sufficient to promote amyloid aggregation and/or oligomerization of the protein. In some embodiments, the protein and Gal3 are combined and incubated at a temperature of about 10, 11, 12, 13, 14, 15, 16, 17, 18, 19, 20, 21, 22, 23, 24, 25, 26, 27, 28, 29, 30, 31, 32, 33, 34, 35, 36, 37, 38, 39, 40, 41, 42, 43, 44, or 45° C., or any temperature within a range defined by any two of the aforementioned temperatures. In some embodiments, the protein and Gal3 are combined and incubated at body temperature, 37° C. or about 37° C. In some embodiments, the protein and Gal3 are combined and incubated at below body temperature, below 37° C., or below about 37° C. In some embodiments, the protein and Gal3 are combined and incubated at room temperature or about room temperature. In some embodiments, the protein and Gal3 are combined and incubated at a temperature of about 18, 19, 20, 21, 22, 23, or 24° C., or any temperature within a range defined by any two of the aforementioned temperatures. The resultant protein, and amyloid aggregates and/or oligomers thereof may be assessed by methods generally known in the art, such as Western blot, dot blot, and ELISA.

[0276] In some embodiments, one can a) incubate Gal3 with IAPP (such as human IAPP) at 100 μg/mL concentration each in an Eppendorf tube under constant stirring, b) at regular intervals such as 0, 0.5, 1, 2, 3, 4, and 5 hours, an aliquot can be stored at −20° C. for oligomerization analysis using Western blot or dot blot, and c) one can blot with ill antibody, which specifically recognizes oligomer conformation, to determine the IAPP oligomerization over time in the presence of Gal3. In some embodiments, the protein can be substituted for α-synuclein, tau protein, TAR DNA-binding protein 43 (TDP-43), transthyretin (TTR), uromodulin, serum amyloid A (SAA), p53, or any other protein disclosed herein. In some embodiments, the ill antibody can be substituted for A11 antibody, which also binds to protein oligomers.

[0277] Some aspects of the present disclosure are directed towards a method of inhibiting Gal3-mediated amyloid aggregation of a protein, comprising: contacting the protein with an anti-Gal3 antibody or binding fragment thereof, wherein binding of the anti-Gal3 antibody or binding fragment thereof to Gal3 inhibits Gal3-mediated amyloid aggregation of the protein.

[0278] FIG. 2 is a flow chart depicting some embodiments of methods for inhibiting Gal3-mediated aggregation of a protein.

[0279] In some embodiments are disclosed methods of inhibiting Gal3-mediated amyloid aggregation of a protein 200. In some embodiments, the methods comprise contacting the protein with an anti-Gal3 antibody or binding fragment thereof 201. In some embodiments, binding of the anti-Gal3 antibody 202 or binding fragment thereof to Gal3 inhibits Gal3-mediated amyloid aggregation of the protein 203. In some embodiments, the protein is in a cell. In some embodiments, the protein 204 comprises α-synuclein, tau protein, phospho tau, TAR DNA binding protein (TDP-43), transthyretin, uromodulin, islet amyloid polypeptide (IAPP), serum amyloid A (SAA), p53, apolipoprotein E (APOE), APOE-4, prion protein, fibrin, neurofilament light (NFL), CRP, SUMO, light chain, platelet-derived growth factor receptor (PDGFR), melanoma cell adhesion molecule (MCAM), complement protein C3, complement protein C9, lysozyme, insulin, native haemoglobin (Hb), glycosylated haemoglobin (HbAIC), phenylalanine (Phe), glutamine (Gln), cholesteryl (co-esteryl), cholesterol, neuroserpin, crystallin AA, crystallin AB, cystatin-C, myostatin pro-peptide, Atrial Natriuretic Peptide (ANP), B-Type Natriuretic Peptide (BNP), or any combination therein.

[0280] Also disclosed herein are methods of inhibiting Gal3-mediated amyloid aggregation of a protein in a cell. In some embodiments, the methods comprise contacting the cell with an anti-Gal3 antibody or binding fragment thereof. In some embodiments, binding of the anti-Gal3 antibody or binding fragment thereof to Gal3 in the cell inhibits Gal3-mediated amyloid aggregation of the protein.

[0281] In some embodiments, the method is performed in vitro or in vivo.

[0282] In some embodiments, Gal3-mediated amyloid aggregation of the protein is inhibited by at least 5%, 10%, 15%, 20%, 25%, 30%, 35%, 40%, 45%, 50%, 55%, 60%, 65%, 70%, 75%, 80%, 85%, 90%, 95%, or 99%, or any percentage within a range defined by any two of the aforementioned percentages, after contacting with the anti-Gal3 antibody or binding fragment thereof relative to a cell that is not contacted with the anti-Gal3 antibody or binding fragment thereof.

[0283] In some embodiments, the protein comprises α-synuclein, tau protein, phospho tau, TAR DNA binding protein (TDP-43), transthyretin, uromodulin, islet amyloid polypeptide (IAPP), serum amyloid A (SAA), p53, apolipoprotein E (APOE), APOE-4, prion protein, fibrin, neurofilament light (NFL), CRP, SUMO, light chain, platelet-derived growth factor receptor (PDGFR), melanoma cell adhesion molecule (MCAM), complement protein C3, complement protein C9, lysozyme, insulin, native haemoglobin (Hb), glycosylated haemoglobin (HbAIC), phenylalanine (Phe), glutamine (Gln), cholesteryl (co-esteryl), cholesterol, neuroserpin, crystallin AA, crystallin AB, cystatin-C, myostatin pro-peptide, Atrial Natriuretic Peptide (ANP), B-Type Natriuretic Peptide (BNP), or any combination therein. In some embodiments, the phosphorylated tau forms trimers, tetramers, or higher order oligomers when contacted with Gal3.

[0284] In some embodiments, the anti-Gal3 antibody or binding fragment thereof comprises (1) a heavy chain variable region comprising a V_{H}-CDR1, a V_{H}-CDR2, and a V_{H}-CDR3; and (2) a light chain variable region comprising a V_{L}-CDR1, a V_{L}-CDR2, and a V_{L}-CDR3. In some embodiments, the V_{H}-CDR1 comprises an amino acid sequence having at least 80%, 81%, 82%, 83%, 84%, 85%, 86%, 87%, 88%, 89%, 90%, 91%, 92%, 93%, 94%, 95%, 96%, 97%, 98%, 99%, or 100% identity to any one of the amino acid sequences of SEQ ID NOs: 27-70. In some embodiments, the V_{H}-CDR2 comprises an amino acid sequence having at least 80%, 81%, 82%, 83%, 84%, 85%, 86%, 87%, 88%, 89%, 90%, 91%, 92%, 93%, 94%, 95%, 96%, 97%, 98%, 99%, or 100% identity to any one of the amino acid sequences of SEQ ID NOs: 71-111, 801, 951, 952. In some embodiments, the V_{H}-CDR3 comprises an amino acid sequence having at least 80%, 81%, 82%, 83%, 84%, 85%, 86%, 87%, 88%, 89%, 90%, 91%, 92%, 93%, 94%, 95%, 96%, 97%, 98%, 99%, or 100% identity to any one of the amino acid sequences of SEQ ID NOs: 112-169, 802, 953, 954. In some embodiments, the V_{L}-CDR1 comprises an amino acid sequence having at least 80%, 81%, 82%, 83%, 84%, 85%, 86%, 87%, 88%, 89%, 90%, 91%, 92%, 93%, 94%, 95%, 96%, 97%, 98%, 99%, or 100% identity to any one of the amino acid sequences of SEQ ID NOs: 170-220. In some embodiments, the V_{L}-CDR2 comprises an amino acid sequence having at least 80%, 81%, 82%, 83%, 84%, 85%, 86%, 87%, 88%, 89%, 90%, 91%, 92%, 93%, 94%, 95%, 96%, 97%, 98%, 99%, or 100% identity to any one of the amino acid sequences of SEQ ID NOs: 211-247. In some embodiments, the V_{L}-CDR3 comprises an amino acid sequence having at least 80%, 81%, 82%, 83%, 84%, 85%, 86%, 87%, 88%, 89%, 90%, 91%, 92%, 93%, 94%, 95%, 96%, 97%, 98%, 99%, or 100% identity to any one of the amino acid sequences of SEQ ID NOs: 248-296. In some embodiments, the anti-Gal3 antibody or binding fragment thereof comprises a combination of the V_{H}-CDR1, V_{H}-CDR2, V_{H}-CDR3, V_{L}-CDR1, V_{L}-CDR2, and V_{L}-CDR3 as illustrated in FIG. 13. In some embodiments, the heavy chain variable region comprises a sequence having at least 80%, 81%, 82%, 83%, 84%, 85%, 86%, 87%, 88%, 89%, 90%, 91%, 92%, 93%, 94%, 95%, 96%, 97%, 98%, or 99% identity to the sequence selected from SEQ ID NOs: 374-447, 821-835, 941-943, 969-982, 1110-1152, 1440-1464. In some embodiments, the light chain variable region comprises a sequence having at least 80%, 81%, 82%, 83%, 84%, 85%, 86%, 87%, 88%, 89%, 90%, 91%, 92%, 93%, 94%, 95%, 96%, 97%, 98%, or 99% identity to the sequence selected from SEQ ID NOs: 374-447, 821-835, 941-943, 969-982, 1110-1152, 1440-1464. In some embodiments, the anti-Gal3 antibody or binding fragment thereof comprises a heavy chain, wherein the heavy chain comprises a sequence having at least 80%, 81%, 82%, 83%, 84%, 85%, 86%, 87%, 88%, 89%, 90%, 91%, 92%, 93%, 94%, 95%, 96%, 97%, 98%, or 99% identity to the sequence selected from SEQ ID NOs: 448-494, 804, 836-850, 983-996, 1153-1195, 1411, 1465-1489. In some embodiments, the anti-Gal3 antibody or binding fragment thereof comprises a light chain, wherein the light chain comprises a sequence having at least 80%, 81%, 82%, 83%, 84%, 85%, 86%, 87%, 88%, 89%, 90%, 91%, 92%, 93%, 94%, 95%, 96%, 97%, 98%, or 99% identity to the sequence selected from SEQ ID NOs: 495-538, 805, 851-865, 997-1010, 1196-1238, 1412, 1490-1514. In some embodiments, any antibody (human, humanized, or not) that competes for binding to any one or more of the proceeding antibodies (optionally at, at least 80% competition as defined in the present examples, e.g., Example 54), can be used in the method as well. In some embodiments, the antibody binds to the same or overlapping epitope of any one or more of the preceding antibodies.

[0285] In some embodiments, the anti-Gal3 antibody or binding fragment thereof is selected from the group consisting of at least one of: TB001, TB006, 12G5.D7, 13A12.2E5, 14H10.2C9, 15F10.2D6, 19B5.2E6, 20D11.2C6, 20H5.A3, 23H9.2E4, 2D10.2B2, 3B11.2G2, 7D8.2D8, mIMT001, 4A11.2B5, 4A11.H1L1, 4A11.H4L2, 4G2.2G6, 6B3.2D3, 6H6.2D6, 9H2.2H10, 13G4.2F8, 13H12.2F8, 15G7.2A7, 19D9.2E5, 23B10.2B12, 24D12.2H9, F846C.1B2, F846C.1F5, F846C.1H12, F846C.1H5, F846C.2H3, F846TC.14A2, F846TC.14E4, F846TC.16B5, F846TC.7F10, F847C.10B9, F847C.11B1, F847C.12F12, F847C.26F5, F847C.4B10, F849C.8D10, F849C.8H3, 846.2B11, 846.4D5, 846T.1H2, 847.14H4, 846.2D4, 846.2F11, 846T.10B1, 846T.2E3, 846T.4C9, 846T.4E11, 846T.4F5, 846T.8D1, 847.10C9, 847.11D6, 847.15D12, 847.15F9, 847.15H11, 847.20H7, 847.21B11, 847.27B9, 847.28D1, 847.2B8, 847.3B3, 849.1D2, 849.2D7, 849.2F12, 849.4B2, 849.4F12, 849.4F2, 849.5C2, 849.8D12, F847C.21H6, 849.5H1, 847.23F11, 847.16D10, 847.13E2-mH0mL1, 847.13E2-mH0mL2, 847.12C4, 847.4D3, 2D10-VH0-VL0, 2D10-hVH4-HVL1, 2D10-hVH4-HVL2, 2D10-hVH4-HVL3, 2D10-hVH4-HVL4, 2D10-hVH3-HVL1, 2D10-hVH3-HVL2, 2D10-hVH3-HVL3, 2D10-hVH3-HVL4, 20H5.A3-VH3VL1, 20H5.A3-VH3VL3, 20H5.A3-VH4VL1, 20H5.A3-VH5VL1, 20H5.A3-VH5VL3, 20H5.A3-VH6VL1, 20H5.A3-VH6VL3, or a binding fragment thereof. In some embodiments, the anti-Gal3 antibody or binding fragment thereof is selected from the group consisting of at least one of: 2D10-VH0-VL0, 2D10-hVH4-HVL1, 2D10-hVH4-HVL2, 2D10-hVH4-HVL3, 2D10-hVH4-HVL4, 2D10-hVH3-HVL1, 2D10-hVH3-HVL2, 2D10-hVH3-HVL3, 2D10-hVH3-HVL4, or binding fragment thereof. In some embodiments, the anti-Gal3 antibody or binding fragment thereof is selected from the group consisting of at least one of: 21H6-H0L0, 21H6-H1L1, 21H6-H1L2, 21H6-H1L3, 21H6-H1L4, 21H6-H2L1, 21H6-H2L2, 21H6-H2L3, 21H6-H2L4, 21H6-H3L1, 21H6-H3L2, 21H6-H3L3, 21H6-H3L4, 21H6-H4L1, 21H6-H4L2, 21H6-H4L3, 21H6-H4L4, 21H6-H5L1, 21H6-H5L2, 21H6-H5L3, 21H6-H5L4, 21H6-H6L1, 21H6-H6L2, 21H6-H6L3, 21H6-H6L4, or a binding fragment thereof. In some embodiments, any antibody (human, humanized, or not) that competes for binding to any one or more of the proceeding antibodies (optionally at, at least 80% competition as defined in the present examples, e.g., Example 54), can be used in the method as well. In some embodiments, the antibody binds to the same or overlapping epitope of any one or more of the preceding antibodies.

[0286] Some aspects of the present disclosure are directed towards a method of treating an amyloid proteopathy in a subject in need thereof, comprising: administering to the subject an anti-Gal3 antibody or binding fragment thereof, wherein binding of the anti-Gal3 antibody or binding fragment thereof to Gal3 in the subject inhibits Gal3-mediated amyloid aggregation of a protein in the subject, thereby treating the amyloid proteopathy in the subject.

[0287] Some aspects of the present disclosure are directed towards a method of treating a proteopathy in a subject in need thereof, comprising: administering to the subject an anti-Gal3 antibody or binding fragment thereof, wherein binding of the anti-Gal3 antibody or binding fragment thereof to Gal3 in the subject inhibits Gal3-mediated oligomerization of a protein in the subject, thereby treating the proteopathy in the subject.

[0288] FIG. 3 is a flow chart depicting some embodiments of methods of treating an amyloid proteopathy.

[0289] In some embodiments are disclosed methods of treating an amyloid proteopathy in a subject in need thereof 300. In some embodiments are disclosed methods of treating a proteopathy in a subject in need thereof. In some embodiments, the methods comprise administering to the subject an anti-Gal3 antibody or binding fragment thereof 301. In some embodiments, binding of the anti-Gal3 antibody or binding fragment thereof to Gal3 302 in the subject inhibits Gal3-mediated amyloid aggregation of a protein 303 in the subject. In some embodiments, binding of the anti-Gal3 antibody or binding fragment thereof to Gal3 in the subject inhibits Gal3-mediated oligomerization of a protein in the subject. In some embodiments, the protein comprises α-synuclein, tau protein, phospho tau, TAR DNA binding protein (TDP-43), transthyretin, uromodulin, islet amyloid polypeptide (IAPP), serum amyloid A (SAA), p53, apolipoprotein E (APOE), APOE-4, prion protein, fibrin, neurofilament light (NFL), CRP, SUMO, light chain, platelet-derived growth factor receptor (PDGFR), melanoma cell adhesion molecule (MCAM), complement protein C3, complement protein C9, lysozyme, insulin, native haemoglobin (Hb), glycosylated haemoglobin (HbAIC), phenylalanine (Phe), glutamine (Gln), cholesteryl (co-esteryl), cholesterol, neuroserpin, crystallin AA, crystallin AB, cystatin-C, myostatin pro-peptide, Atrial Natriuretic Peptide (ANP), B-Type Natriuretic Peptide (BNP), or any combination therein. In some embodiments, inhibition of amyloid aggregation and/or oligomerization results in treatment of the amyloid proteopathy in the subject 304. In some embodiments, the proteopathy or amyloid proteopathy comprises familial Creutzfeldt-Jakob disease (CJD), Alzheimer's disease, CAA, tauopathies, Lewy body disease, multiple system atrophy, atherosclerosis, cardiovascular disease, familial encephalopathy with neuroserpin inclusion bodies (FENIB), insulin-derived amyloidosis, diabetes, type 2 diabetes, diabetes mellitus, kidney disease, prion disease, transmissible spongiform encephalopathy (TSE), human systemic amyloid disease, fatal familial insomnia, Gerstmann-Straussler-Scheinker disease, idiopathic inflammatory myopathies (IIM), transthyretin amyloidosis, heart disease, pre-eclampsia, phenylketonuria, Huntington disease, motor neuron degeneration, cerebrovascular damage, stroke disruption in innate immune system, damage to lenses, blurring of vision, congestive heart failure (CHF), cardiac amyloidosis, medullary carcinoma of the thyroid (MTC), osteoporosis, Paget's disease, peripheral amyloidosis, amyotrophic lateral sclerosis (ALS), frontotemporal lobar degeneration (FTLD), hyperglycemia, light chain amyloidosis (AL), a synucleinopathy, Parkinson's disease, dementia with Lewy bodies, progressive supranuclear palsy, corticobasal degeneration, Pick's disease, TDP-43 proteopathy, TTR amyloidosis (ATTR), uromodulin-associated kidney disease, rheumatoid arthritis, inflammatory arthritis, spondyloarthropathies, juvenile idiopathic arthritis, ankylosing spondylitis, psoriatic arthritis, inflammatory bowel disease, ulcerative colitis, Crohn's disease, celiac disease, vasculitis, sarcoidosis, familial Mediterranean fever, tumor necrosis factor receptor-associated periodic syndrome (TRAPS), cancer, aging promoted by amyloid aggregation, or any combination thereof.

[0290] In some embodiments, the protein is in a cell. In some embodiments, the protein comprises α-synuclein, tau protein, phospho tau, TAR DNA binding protein (TDP-43), transthyretin, uromodulin, islet amyloid polypeptide (IAPP), serum amyloid A (SAA), p53, apolipoprotein E (APOE), APOE-4, prion protein, fibrin, neurofilament light (NFL), CRP, SUMO, light chain, platelet-derived growth factor receptor (PDGFR), melanoma cell adhesion molecule (MCAM), complement protein C3, complement protein C9, lysozyme, insulin, native haemoglobin (Hb), glycosylated haemoglobin (HbAIC), phenylalanine (Phe), glutamine (Gln), cholesteryl (co-esteryl), cholesterol, neuroserpin, crystallin AA, crystallin AB, cystatin-C, myostatin pro-peptide, Atrial Natriuretic Peptide (ANP), B-Type Natriuretic Peptide (BNP), or any combination therein.

[0291] In some embodiments, the anti-Gal3 antibody, or binding fragment thereof, comprises TB001, TB006, 12G5.D7, 13A12.2E5, 14H10.2C9, 15F10.2D6, 19B5.2E6, 20D11.2C6, 20H5.A3, 23H9.2E4, 2D10.2B2, 3B11.2G2, 7D8.2D8, mIMT001, 4A11.2B5, 4A11.H1L1, 4A11.H4L2, 4G2.2G6, 6B3.2D3, 6H6.2D6, 9H2.2H10, 13G4.2F8, 13H12.2F8, 15G7.2A7, 19D9.2E5, 23B10.2B12, 24D12.2H9, F846C.1B2, F846C.1F5, F846C.1H12, F846C.1H5, F846C.2H3, F846TC.14A2, F846TC.14E4, F846TC.16B5, F846TC.7F10, F847C.10B9, F847C.11B1, F847C.12F12, F847C.26F5, F847C.4B10, F849C.8D10, F849C.8H3, 846.2B11, 846.4D5, 846T.1H2, 847.14H4, 846.2D4, 846.2F11, 846T.10B1, 846T.2E3, 846T.4C9, 846T.4E11, 846T.4F5, 846T.8D1, 847.10C9, 847.11D6, 847.15D12, 847.15F9, 847.15H11, 847.20H7, 847.21B11, 847.27B9, 847.28D1, 847.2B8, 847.3B3, 849.1D2, 849.2D7, 849.2F12, 849.4B2, 849.4F12, 849.4F2, 849.5C2, 849.8D12, F847C.21H6, 849.5H1, 847.23F11, 847.16D10, 847.13E2-mH0mL1, 847.13E2-mH0mL2, 847.12C4, 847.4D3, 2D10-VH0-VL0, 2D10-hVH4-HVL1, 2D10-hVH4-HVL2, 2D10-hVH4-HVL3, 2D10-hVH4-HVL4, 2D10-hVH3-HVL1, 2D10-hVH3-HVL2, 2D10-hVH3-HVL3, 2D10-hVH3-HVL4, 20H5.A3-VH3VL1, 20H5.A3-VH3VL3, 20H5.A3-VH4VL1, 20H5.A3-VH5VL1, 20H5.A3-VH5VL3, 20H5.A3-VH6VL1, 20H5.A3-VH6VL3, 2D10-VH0-VL0, 2D10-hVH4-HVL1, 2D10-hVH4-HVL2, 2D10-hVH4-HVL3, 2D10-hVH4-HVL4, 2D10-hVH3-HVL1, 2D10-hVH3-HVL2, 2D10-hVH3-HVL3, 2D10-hVH3-HVL4, 21H6-H0L0, 21H6-H1L1, 21H6-H1L2, 21H6-H1L3, 21H6-H1L4, 21H6-H2L1, 21H6-H2L2, 21H6-H2L3, 21H6-H2L4, 21H6-H3L1, 21H6-H3L2, 21H6-H3L3, 21H6-H3L4, 21H6-H4L1, 21H6-H4L2, 21H6-H4L3, 21H6-H4L4, 21H6-H5L1, 21H6-H5L2, 21H6-H5L3, 21H6-H5L4, 21H6-H6L1, 21H6-H6L2, 21H6-H6L3, and/or 21H6-H6L4. In some embodiments, any antibody (human, humanized, or not) that competes for binding to any one or more of the proceeding antibodies (optionally at, at least 80% competition as defined in the present examples, e.g., Example 54), can be used in the method as well. In some embodiments, the antibody binds to the same or overlapping epitope of any one or more of the preceding antibodies.

[0292] In some embodiments, the anti-Gal3 blocking antibody blocks anti-Gal3 antibody binding to Gal3 by about 50%, 60%, 70% 75%, 80%, 81%, 82%, 83%, 84%, 85%, 86%, 87%, 88%, 89%, 90%, 91%, 92%, 93%, 94%, 95%, 96%, 97%, 98%, or 99% as compared to anti-Gal3 antibody binding in the absence of the anti-Gal3 blocking antibody, or blocks anti-Gal3 antibody binding to Gal3 by a range that is defined by any two of the preceding values. For example, in some embodiments, the anti-Gal3 blocking antibody blocks anti-Gal3 antibody binding by between about 50% and 100%, 50% and 95%, 50% and 90%, 50% and 85%, 50% and 80%, 50% and 75%, 50% and 70%, 50% and 60%, 60% and 100%, 60% and 95%, 60% and 90%, 60% and 85%, 60% and 80%, 60% and 75%, 75% and 100%, 75% and 95%, 75% and 90%, or 75% and 85%, as compared to anti-Gal3 antibody binding in the absence of the anti-Gal3 blocking antibody.

[0293] In some embodiments, the anti-Gal3 blocking antibody binds to one or more of the same epitopes as the anti-Gal3 antibody. In some embodiments, the antibody is one that competes for binding to any one or more of the proceeding antibodies at a level of at least 80% competition, e.g., Example 54.

[0294] In some embodiments, the anti-Gal3 antibody inhibits Gal3-mediated amyloid aggregation with at least 50%, 60%, 70%, 80%, 90%, 100% efficiency. For example, in some embodiments, binding of the anti-Gal3 antibody inhibits Gal3-mediated amyloid aggregation with at least 50%-100%, 50%-90%, 50%-80%, 50%-70%, or 70%-100% efficiency. In some embodiments, the anti-Gal3 antibody inhibits Gal3-mediated amyloid aggregation by at least 1-fold, 2-fold, 3-fold, 4-fold, 5-fold, 6-fold, 7-fold, 8-fold, 9-fold, or 10-fold, or by a range that is defined by any two of the preceding values. For example, in some embodiments, binding of the anti-Gal3 antibody inhibits Gal3-mediated amyloid aggregation by at least 1-fold to 10-fold, 1-fold to 7-fold, 1-fold to 5-fold, 1 fold-3 fold, 3-fold to 10-fold, 3-fold to 7-fold, 3-fold to 5-fold, 5-fold to 10-fold, or 5-fold to 7-fold.

[0295] In some embodiments, the methods further comprise identifying the subject as needing treatment of the amyloid proteopathy prior to the administering step.

[0296] In some embodiments, the methods further comprise detecting an improvement in the amyloid proteopathy in the subject following the administering step. In some embodiments, identifying the subject as needing treatment of the amyloid proteopathy and/or detecting the improvement in the amyloid proteopathy is done by biopsy, blood or urine test, echocardiogram, or technetium pyrophosphate (99mTc-PYP) scintigraphy.

[0297] In some embodiments, a method of inhibiting Gal3-mediated amyloid aggregation of amyloid β40 and/or amyloid p42 is disclosed. In some embodiments, the method comprises: contacting the protein with an anti-Gal3 antibody or binding fragment thereof, wherein binding of the anti-Gal3 antibody or binding fragment thereof to Gal3 inhibits Gal3-mediated amyloid aggregation of amyloid β40 and/or amyloid β42.

[0298] In some embodiments, a method of treating Alzheimer's disease in a subject in need thereof is disclosed. In some embodiments, the method comprises: administering to the subject an anti-Gal3 antibody or binding fragment thereof, wherein binding of the anti-Gal3 antibody or binding fragment thereof to Gal3 in the subject inhibits Gal3-mediated amyloid aggregation of amyloid β40 and/or amyloid β42 in the subject, thereby treating Alzheimer's disease in the subject.

[0299] In some embodiments, a method of treating CAA in a subject in need thereof is disclosed. In some embodiments, the method comprises: administering to the subject an anti-Gal3 antibody or binding fragment thereof, wherein binding of the anti-Gal3 antibody or binding fragment thereof to Gal3 in the subject inhibits Gal3-mediated amyloid aggregation of amyloid β40 and/or amyloid β42 in the subject, thereby treating CAA in the subject.

[0300] In some embodiments, a method of inhibiting Gal3-mediated amyloid aggregation of phospho tau is disclosed. In some embodiments, the method comprises: contacting the protein with an anti-Gal3 antibody or binding fragment thereof, wherein binding of the anti-Gal3 antibody or binding fragment thereof to Gal3 inhibits Gal3-mediated amyloid aggregation of phospho tau.

[0301] In some embodiments, a method of treating Alzheimer's disease in a subject in need thereof is disclosed. In some embodiments, the method comprises: administering to the subject an anti-Gal3 antibody or binding fragment thereof, wherein binding of the anti-Gal3 antibody or binding fragment thereof to Gal3 in the subject inhibits Gal3-mediated amyloid aggregation of phospho tau in the subject, thereby treating Alzheimer's disease in the subject.

[0302] In some embodiments, a method of treating tauopathies in a subject in need thereof is disclosed. In some embodiments, the method comprises: administering to the subject an anti-Gal3 antibody or binding fragment thereof, wherein binding of the anti-Gal3 antibody or binding fragment thereof to Gal3 in the subject inhibits Gal3-mediated amyloid aggregation of phospho tau in the subject, thereby treating the tauopathy in the subject.

[0303] In some embodiments, a method of inhibiting Gal3-mediated amyloid aggregation of alpha synuclein is disclosed. In some embodiments, the method comprises: contacting the protein with an anti-Gal3 antibody or binding fragment thereof, wherein binding of the anti-Gal3 antibody or binding fragment thereof to Gal3 inhibits Gal3-mediated amyloid aggregation of alpha synuclein.

[0304] In some embodiments, a method of treating Lewy body disease in a subject in need thereof is disclosed. In some embodiments, the method comprises: administering to the subject an anti-Gal3 antibody or binding fragment thereof, wherein binding of the anti-Gal3 antibody or binding fragment thereof to Gal3 in the subject inhibits Gal3-mediated amyloid aggregation of alpha synuclein in the subject, thereby treating Lewy body disease in the subject.

[0305] In some embodiments, a method of treating multiple system atrophy in a subject in need thereof is disclosed. In some embodiments, the method comprises: administering to the subject an anti-Gal3 antibody or binding fragment thereof, wherein binding of the anti-Gal3 antibody or binding fragment thereof to Gal3 in the subject inhibits Gal3-mediated amyloid aggregation of alpha synuclein in the subject, thereby treating multiple system atrophy in the subject.

[0306] In some embodiments, a method of inhibiting Gal3-mediated amyloid aggregation of APOE-4 is disclosed. In some embodiments, the method comprises: contacting the protein with an anti-Gal3 antibody or binding fragment thereof, wherein binding of the anti-Gal3 antibody or binding fragment thereof to Gal3 inhibits Gal3-mediated amyloid aggregation of APOE-4.

[0307] In some embodiments, a method of treating Alzheimer's disease in a subject in need thereof is disclosed. In some embodiments, the method comprises: administering to the subject an anti-Gal3 antibody or binding fragment thereof, wherein binding of the anti-Gal3 antibody or binding fragment thereof to Gal3 in the subject inhibits Gal3-mediated oligomerization of APOE-4 in the subject, thereby treating Alzheimer's disease in the subject.

[0308] In some embodiments, a method of treating CAA in a subject in need thereof is disclosed. In some embodiments, the method comprises: administering to the subject an anti-Gal3 antibody or binding fragment thereof, wherein binding of the anti-Gal3 antibody or binding fragment thereof to Gal3 in the subject inhibits Gal3-mediated amyloid aggregation of alpha synuclein in the subject, thereby treating CAA in the subject.

[0309] In some embodiments, a method of inhibiting Gal3-mediated amyloid aggregation of cholesterol is disclosed. In some embodiments, the method comprises: contacting the protein with an anti-Gal3 antibody or binding fragment thereof, wherein binding of the anti-Gal3 antibody or binding fragment thereof to Gal3 inhibits Gal3-mediated amyloid aggregation of cholesterol.

[0310] In some embodiments, a method of treating Alzheimer's disease in a subject in need thereof is disclosed. In some embodiments, the method comprises: administering to the subject an anti-Gal3 antibody or binding fragment thereof, wherein binding of the anti-Gal3 antibody or binding fragment thereof to Gal3 in the subject inhibits Gal3-mediated amyloid aggregation of cholesterol in the subject, thereby treating Alzheimer's disease in the subject.

[0311] In some embodiments, a method of treating cardiovascular disease in a subject in need thereof is disclosed. In some embodiments, the method comprises: administering to the subject an anti-Gal3 antibody or binding fragment thereof, wherein binding of the anti-Gal3 antibody or binding fragment thereof to Gal3 in the subject inhibits Gal3-mediated amyloid aggregation of cholesterol in the subject, thereby treating cardiovascular disease in the subject.

[0312] In some embodiments, a method of treating atherosclerosis disease in a subject in need thereof is disclosed. In some embodiments, the method comprises: administering to the subject an anti-Gal3 antibody or binding fragment thereof, wherein binding of the anti-Gal3 antibody or binding fragment thereof to Gal3 in the subject inhibits Gal3-mediated amyloid aggregation of cholesterol in the subject, thereby treating atherosclerosis in the subject.

[0313] In some embodiments, a method of inhibiting Gal3-mediated amyloid aggregation of cholesteryl is disclosed. In some embodiments, the method comprises: contacting the protein with an anti-Gal3 antibody or binding fragment thereof, wherein binding of the anti-Gal3 antibody or binding fragment thereof to Gal3 inhibits Gal3-mediated amyloid aggregation of cholesteryl.

[0314] In some embodiments, a method of treating Alzheimer's disease in a subject in need thereof is disclosed. In some embodiments, the method comprises: administering to the subject an anti-Gal3 antibody or binding fragment thereof, wherein binding of the anti-Gal3 antibody or binding fragment thereof to Gal3 in the subject inhibits Gal3-mediated amyloid aggregation of cholesteryl in the subject, thereby treating Alzheimer's disease in the subject.

[0315] In some embodiments, a method of treating cardiovascular disease in a subject in need thereof is disclosed. In some embodiments, the method comprises: administering to the subject an anti-Gal3 antibody or binding fragment thereof, wherein binding of the anti-Gal3 antibody or binding fragment thereof to Gal3 in the subject inhibits Gal3-mediated amyloid aggregation of cholesteryl in the subject, thereby treating cardiovascular disease in the subject.

[0316] In some embodiments, a method of treating atherosclerosis disease in a subject in need thereof is disclosed. In some embodiments, the method comprises: administering to the subject an anti-Gal3 antibody or binding fragment thereof, wherein binding of the anti-Gal3 antibody or binding fragment thereof to Gal3 in the subject inhibits Gal3-mediated amyloid aggregation of cholesteryl in the subject, thereby treating atherosclerosis in the subject.

[0317] In some embodiments, a method of inhibiting Gal3-mediated amyloid aggregation of neuroserpin is disclosed. In some embodiments, the method comprises: contacting the protein with an anti-Gal3 antibody or binding fragment thereof, wherein binding of the anti-Gal3 antibody or binding fragment thereof to Gal3 inhibits Gal3-mediated amyloid aggregation of neuroserpin.

[0318] In some embodiments, a method of treating familial encephalopathy with neuroserpin inclusion bodies (FENIB) in a subject in need thereof is disclosed. In some embodiments, the method comprises: administering to the subject an anti-Gal3 antibody or binding fragment thereof, wherein binding of the anti-Gal3 antibody or binding fragment thereof to Gal3 in the subject inhibits Gal3-mediated amyloid aggregation of neuroserpin in the subject, thereby treating familial encephalopathy with neuroserpin inclusion bodies (FENIB) in the subject.

[0319] In some embodiments, a method of inhibiting Gal3-mediated amyloid aggregation of insulin is disclosed. In some embodiments, the method comprises: contacting the protein with an anti-Gal3 antibody or binding fragment thereof, wherein binding of the anti-Gal3 antibody or binding fragment thereof to Gal3 inhibits Gal3-mediated amyloid aggregation of insulin.

[0320] In some embodiments, a method of treating insulin-derived amyloidosis in a subject in need thereof is disclosed. In some embodiments, the method comprises: administering to the subject an anti-Gal3 antibody or binding fragment thereof, wherein binding of the anti-Gal3 antibody or binding fragment thereof to Gal3 in the subject inhibits Gal3-mediated amyloid aggregation of insulin in the subject, thereby treating insulin-derived amyloidosis in the subject.

[0321] In some embodiments, a method of treating diabetes in a subject in need thereof is disclosed. In some embodiments, the method comprises: administering to the subject an anti-Gal3 antibody or binding fragment thereof, wherein binding of the anti-Gal3 antibody or binding fragment thereof to Gal3 in the subject inhibits Gal3-mediated amyloid aggregation of insulin in the subject, thereby treating diabetes in the subject.

[0322] In some embodiments, a method of inhibiting Gal3-mediated amyloid aggregation of cystatin-c is disclosed. In some embodiments, the method comprises: contacting the protein with an anti-Gal3 antibody or binding fragment thereof, wherein binding of the anti-Gal3 antibody or binding fragment thereof to Gal3 inhibits Gal3-mediated amyloid aggregation of cystatin-c.

[0323] In some embodiments, a method of treating Alzheimer's disease in a subject in need thereof is disclosed. In some embodiments, the method comprises: administering to the subject an anti-Gal3 antibody or binding fragment thereof, wherein binding of the anti-Gal3 antibody or binding fragment thereof to Gal3 in the subject inhibits Gal3-mediated amyloid aggregation of cystatin-c in the subject, thereby treating Alzheimer's disease in the subject.

[0324] In some embodiments, a method of treating CAA in a subject in need thereof is disclosed. In some embodiments, the method comprises: administering to the subject an anti-Gal3 antibody or binding fragment thereof, wherein binding of the anti-Gal3 antibody or binding fragment thereof to Gal3 in the subject inhibits Gal3-mediated amyloid aggregation of cystatin-c in the subject, thereby treating CAA in the subject.

[0325] In some embodiments, a method of treating kidney disease in a subject in need thereof is disclosed. In some embodiments, the method comprises: administering to the subject an anti-Gal3 antibody or binding fragment thereof, wherein binding of the anti-Gal3 antibody or binding fragment thereof to Gal3 in the subject inhibits Gal3-mediated amyloid aggregation of cystatin-c in the subject, thereby treating kidney disease in the subject.

[0326] In some embodiments, a method of inhibiting Gal3-mediated amyloid aggregation of prion protein is disclosed. In some embodiments, the method comprises: contacting the protein with an anti-Gal3 antibody or binding fragment thereof, wherein binding of the anti-Gal3 antibody or binding fragment thereof to Gal3 inhibits Gal3-mediated amyloid aggregation of prion protein.

[0327] In some embodiments, a method of treating prion disease in a subject in need thereof is disclosed. In some embodiments, the method comprises: administering to the subject an anti-Gal3 antibody or binding fragment thereof, wherein binding of the anti-Gal3 antibody or binding fragment thereof to Gal3 in the subject inhibits Gal3-mediated amyloid aggregation of prion protein in the subject, thereby treating prion disease in the subject.

[0328] In some embodiments, a method of treating transmissible spongiform encephalopathy (TSE) in a subject in need thereof is disclosed. In some embodiments, the method comprises: administering to the subject an anti-Gal3 antibody or binding fragment thereof, wherein binding of the anti-Gal3 antibody or binding fragment thereof to Gal3 in the subject inhibits Gal3-mediated amyloid aggregation of prion protein in the subject, thereby treating transmissible spongiform encephalopathy (TSE) in the subject.

[0329] In some embodiments, a method of treating familial Creutzfeldt-Jakob disease (CJD) in a subject in need thereof is disclosed. In some embodiments, the method comprises: administering to the subject an anti-Gal3 antibody or binding fragment thereof, wherein binding of the anti-Gal3 antibody or binding fragment thereof to Gal3 in the subject inhibits Gal3-mediated amyloid aggregation of prion protein in the subject, thereby treating familial Creutzfeldt-Jakob disease (CJD) in the subject.

[0330] In some embodiments, a method of treating fatal familial insomnia in a subject in need thereof is disclosed. In some embodiments, the method comprises: administering to the subject an anti-Gal3 antibody or binding fragment thereof, wherein binding of the anti-Gal3 antibody or binding fragment thereof to Gal3 in the subject inhibits Gal3-mediated amyloid aggregation of prion protein in the subject, thereby treating fatal familial insomnia in the subject.

[0331] In some embodiments, a method of treating Gerstmann-Straussler-Scheinker disease in a subject in need thereof is disclosed. In some embodiments, the method comprises: administering to the subject an anti-Gal3 antibody or binding fragment thereof, wherein binding of the anti-Gal3 antibody or binding fragment thereof to Gal3 in the subject inhibits Gal3-mediated amyloid aggregation of prion protein in the subject, thereby treating Gerstmann-Straussler-Scheinker disease in the subject.

[0332] In some embodiments, a method of inhibiting Gal3-mediated amyloid aggregation of myostatin is disclosed. In some embodiments, the method comprises: contacting the protein with an anti-Gal3 antibody or binding fragment thereof, wherein binding of the anti-Gal3 antibody or binding fragment thereof to Gal3 inhibits Gal3-mediated amyloid aggregation of myostatin.

[0333] In some embodiments, a method of treating idiopathic inflammatory myopathies (IIM) in a subject in need thereof is disclosed. In some embodiments, the method comprises: administering to the subject an anti-Gal3 antibody or binding fragment thereof, wherein binding of the anti-Gal3 antibody or binding fragment thereof to Gal3 in the subject inhibits Gal3-mediated amyloid aggregation of myostatin in the subject, thereby treating idiopathic inflammatory myopathies (IIM) in the subject.

[0334] In some embodiments, a method of inhibiting Gal3-mediated amyloid aggregation of transthyretin is disclosed. In some embodiments, the method comprises: contacting the protein with an anti-Gal3 antibody or binding fragment thereof, wherein binding of the anti-Gal3 antibody or binding fragment thereof to Gal3 inhibits Gal3-mediated amyloid aggregation of transthyretin.

[0335] In some embodiments, a method of treating transthyretin amyloidosis in a subject in need thereof is disclosed. In some embodiments, the method comprises: administering to the subject an anti-Gal3 antibody or binding fragment thereof, wherein binding of the anti-Gal3 antibody or binding fragment thereof to Gal3 in the subject inhibits Gal3-mediated amyloid aggregation of transthyretin in the subject, thereby treating transthyretin amyloidosis in the subject.

[0336] In some embodiments, a method of treating heart and/or kidney disease in a subject in need thereof is disclosed. In some embodiments, the method comprises: administering to the subject an anti-Gal3 antibody or binding fragment thereof, wherein binding of the anti-Gal3 antibody or binding fragment thereof to Gal3 in the subject inhibits Gal3-mediated amyloid aggregation of transthyretin in the subject, thereby treating heart and/or kidney disease in the subject.

[0337] In some embodiments, a method of treating preeclampsia in a subject in need thereof is disclosed. In some embodiments, the method comprises: administering to the subject an anti-Gal3 antibody or binding fragment thereof, wherein binding of the anti-Gal3 antibody or binding fragment thereof to Gal3 in the subject inhibits Gal3-mediated amyloid aggregation of transthyretin in the subject, thereby treating preeclampsia in the subject.

[0338] In some embodiments, a method of inhibiting Gal3-mediated amyloid aggregation of phenylalanine is disclosed. In some embodiments, the method comprises: contacting the protein with an anti-Gal3 antibody or binding fragment thereof, wherein binding of the anti-Gal3 antibody or binding fragment thereof to Gal3 inhibits Gal3-mediated amyloid aggregation of phenylalanine.

[0339] In some embodiments, a method of treating phenylketonuria in a subject in need thereof is disclosed. In some embodiments, the method comprises: administering to the subject an anti-Gal3 antibody or binding fragment thereof, wherein binding of the anti-Gal3 antibody or binding fragment thereof to Gal3 in the subject inhibits Gal3-mediated amyloid aggregation of phenylalanine in the subject, thereby treating phenylketonuria in the subject.

[0340] In some embodiments, a method of inhibiting Gal3-mediated amyloid aggregation of glutamine is disclosed. In some embodiments, the method comprises: contacting the protein with an anti-Gal3 antibody or binding fragment thereof, wherein binding of the anti-Gal3 antibody or binding fragment thereof to Gal3 inhibits Gal3-mediated amyloid aggregation of glutamine.

[0341] In some embodiments, a method of treating Huntington Disease in a subject in need thereof is disclosed. In some embodiments, the method comprises: administering to the subject an anti-Gal3 antibody or binding fragment thereof, wherein binding of the anti-Gal3 antibody or binding fragment thereof to Gal3 in the subject inhibits Gal3-mediated amyloid aggregation of glutamine in the subject, thereby treating Huntington Disease in the subject.

[0342] In some embodiments, a method of inhibiting Gal3-mediated amyloid aggregation of Neurofibrillary Light chain (NFL) is disclosed. In some embodiments, the method comprises: contacting the protein with an anti-Gal3 antibody or binding fragment thereof, wherein binding of the anti-Gal3 antibody or binding fragment thereof to Gal3 inhibits Gal3-mediated amyloid aggregation of NFL.

[0343] In some embodiments, a method of treating motor neuron degeneration in a subject in need thereof is disclosed. In some embodiments, the method comprises: administering to the subject an anti-Gal3 antibody or binding fragment thereof, wherein binding of the anti-Gal3 antibody or binding fragment thereof to Gal3 in the subject inhibits Gal3-mediated amyloid aggregation of NFL in the subject, thereby treating motor neuron degeneration in the subject.

[0344] In some embodiments, a method of inhibiting Gal3-mediated amyloid aggregation of fibrin is disclosed. In some embodiments, the method comprises: contacting the protein with an anti-Gal3 antibody or binding fragment thereof, wherein binding of the anti-Gal3 antibody or binding fragment thereof to Gal3 inhibits Gal3-mediated amyloid aggregation of fibrin.

[0345] In some embodiments, a method of treating cerebrovascular damage in a subject in need thereof is disclosed. In some embodiments, the method comprises: administering to the subject an anti-Gal3 antibody or binding fragment thereof, wherein binding of the anti-Gal3 antibody or binding fragment thereof to Gal3 in the subject inhibits Gal3-mediated amyloid aggregation of fibrin in the subject, thereby treating cerebrovascular damage in the subject.

[0346] In some embodiments, a method of treating stroke in a subject in need thereof is disclosed. In some embodiments, the method comprises: administering to the subject an anti-Gal3 antibody or binding fragment thereof, wherein binding of the anti-Gal3 antibody or binding fragment thereof to Gal3 in the subject inhibits Gal3-mediated amyloid aggregation of fibrin in the subject, thereby treating stroke in the subject.

[0347] In some embodiments, a method of treating CAA in a subject in need thereof is disclosed. In some embodiments, the method comprises: administering to the subject an anti-Gal3 antibody or binding fragment thereof, wherein binding of the anti-Gal3 antibody or binding fragment thereof to Gal3 in the subject inhibits Gal3-mediated amyloid aggregation of fibrin in the subject, thereby treating CAA in the subject.

[0348] In some embodiments, a method of treating Alzheimer's disease in a subject in need thereof is disclosed. In some embodiments, the method comprises: administering to the subject an anti-Gal3 antibody or binding fragment thereof, wherein binding of the anti-Gal3 antibody or binding fragment thereof to Gal3 in the subject inhibits Gal3-mediated amyloid aggregation of fibrin in the subject, thereby treating Alzheimer's disease in the subject.

[0349] In some embodiments, a method of inhibiting Gal3-mediated amyloid aggregation of lysozyme is disclosed. In some embodiments, the method comprises: contacting the protein with an anti-Gal3 antibody or binding fragment thereof, wherein binding of the anti-Gal3 antibody or binding fragment thereof to Gal3 inhibits Gal3-mediated amyloid aggregation of lysozyme.

[0350] In some embodiments, a method of treating human systemic amyloid disease in a subject in need thereof is disclosed. In some embodiments, the method comprises: administering to the subject an anti-Gal3 antibody or binding fragment thereof, wherein binding of the anti-Gal3 antibody or binding fragment thereof to Gal3 in the subject inhibits Gal3-mediated amyloid aggregation of lysozyme in the subject, thereby treating human systemic amyloid disease in the subject.

[0351] In some embodiments, a method of inhibiting Gal3-mediated amyloid aggregation of complement proteins C3 and/or C9 is disclosed. In some embodiments, the method comprises: contacting the protein with an anti-Gal3 antibody or binding fragment thereof, wherein binding of the anti-Gal3 antibody or binding fragment thereof to Gal3 inhibits Gal3-mediated amyloid aggregation of complement proteins C3 and/or C9.

[0352] In some embodiments, a method of treating disruption in innate immune system in a subject in need thereof is disclosed. In some embodiments, the method comprises: administering to the subject an anti-Gal3 antibody or binding fragment thereof, wherein binding of the anti-Gal3 antibody or binding fragment thereof to Gal3 in the subject inhibits Gal3-mediated amyloid aggregation of complement proteins C3 and/or C9 in the subject, thereby treating disruption in innate immune system in the subject.

[0353] In some embodiments, a method of inhibiting Gal3-mediated amyloid aggregation of crystallins is disclosed. In some embodiments, the method comprises: contacting the protein with an anti-Gal3 antibody or binding fragment thereof, wherein binding of the anti-Gal3 antibody or binding fragment thereof to Gal3 inhibits Gal3-mediated amyloid aggregation of crystallins.

[0354] In some embodiments, a method of treating damage to lenses and/or blurring of vision in a subject in need thereof is disclosed. In some embodiments, the method comprises: administering to the subject an anti-Gal3 antibody or binding fragment thereof, wherein binding of the anti-Gal3 antibody or binding fragment thereof to Gal3 in the subject inhibits Gal3-mediated amyloid aggregation of crystallins in the subject, thereby treating damage to lenses and/or blurring of vision in the subject.

[0355] In some embodiments, a method of inhibiting Gal3-mediated amyloid aggregation of atrial natriuretic peptide (ANP) is disclosed. In some embodiments, the method comprises: contacting the protein with an anti-Gal3 antibody or binding fragment thereof, wherein binding of the anti-Gal3 antibody or binding fragment thereof to Gal3 inhibits Gal3-mediated amyloid aggregation of ANP.

[0356] In some embodiments, a method of treating congestive heart failure (CHF) in a subject in need thereof is disclosed. In some embodiments, the method comprises: administering to the subject an anti-Gal3 antibody or binding fragment thereof, wherein binding of the anti-Gal3 antibody or binding fragment thereof to Gal3 in the subject inhibits Gal3-mediated amyloid aggregation of ANP in the subject, thereby treating CHF in the subject.

[0357] In some embodiments, a method of treating cardiac amyloidosis in a subject in need thereof is disclosed. In some embodiments, the method comprises: administering to the subject an anti-Gal3 antibody or binding fragment thereof, wherein binding of the anti-Gal3 antibody or binding fragment thereof to Gal3 in the subject inhibits Gal3-mediated amyloid aggregation of ANP in the subject, thereby treating cardiac amyloidosis in the subject.

[0358] In some embodiments, a method of inhibiting Gal3-mediated amyloid aggregation of B-Type Natriuretic Peptide (BNP) is disclosed. In some embodiments, the method comprises: contacting the protein with an anti-Gal3 antibody or binding fragment thereof, wherein binding of the anti-Gal3 antibody or binding fragment thereof to Gal3 inhibits Gal3-mediated amyloid aggregation of BNP.

[0359] In some embodiments, a method of treating congestive heart failure (CHF) in a subject in need thereof is disclosed. In some embodiments, the method comprises: administering to the subject an anti-Gal3 antibody or binding fragment thereof, wherein binding of the anti-Gal3 antibody or binding fragment thereof to Gal3 in the subject inhibits Gal3-mediated amyloid aggregation of BNP in the subject, thereby treating CHF in the subject.

[0360] In some embodiments, a method of treating cardiac amyloidosis in a subject in need thereof is disclosed. In some embodiments, the method comprises: administering to the subject an anti-Gal3 antibody or binding fragment thereof, wherein binding of the anti-Gal3 antibody or binding fragment thereof to Gal3 in the subject inhibits Gal3-mediated amyloid aggregation of BNP in the subject, thereby treating cardiac amyloidosis in the subject.

[0361] In some embodiments, a method of inhibiting Gal3-mediated amyloid aggregation calcitonin is disclosed. In some embodiments, the method comprises: contacting the protein with an anti-Gal3 antibody or binding fragment thereof, wherein binding of the anti-Gal3 antibody or binding fragment thereof to Gal3 inhibits Gal3-mediated amyloid aggregation of calcitonin.

[0362] In some embodiments, a method of treating medullary carcinoma of the thyroid (MTC) in a subject in need thereof is disclosed. In some embodiments, the method comprises: administering to the subject an anti-Gal3 antibody or binding fragment thereof, wherein binding of the anti-Gal3 antibody or binding fragment thereof to Gal3 in the subject inhibits Gal3-mediated amyloid aggregation of calcitonin in the subject, thereby treating MTC in the subject.

[0363] In some embodiments, a method of treating osteoporosis in a subject in need thereof is disclosed. In some embodiments, the method comprises: administering to the subject an anti-Gal3 antibody or binding fragment thereof, wherein binding of the anti-Gal3 antibody or binding fragment thereof to Gal3 in the subject inhibits Gal3-mediated amyloid aggregation of calcitonin in the subject, thereby treating osteoporosis in the subject.

[0364] In some embodiments, a method of treating Paget's Disease in a subject in need thereof is disclosed. In some embodiments, the method comprises: administering to the subject an anti-Gal3 antibody or binding fragment thereof, wherein binding of the anti-Gal3 antibody or binding fragment thereof to Gal3 in the subject inhibits Gal3-mediated amyloid aggregation of calcitonin in the subject, thereby treating Paget's Disease in the subject.

[0365] In some embodiments, a method of inhibiting Gal3-mediated amyloid aggregation Serum Amyloid (A) (SAA) is disclosed. In some embodiments, the method comprises: contacting the protein with an anti-Gal3 antibody or binding fragment thereof, wherein binding of the anti-Gal3 antibody or binding fragment thereof to Gal3 inhibits Gal3-mediated amyloid aggregation of Serum Amyloid (A) (SAA).

[0366] In some embodiments, a method of treating peripheral amyloidosis in a subject in need thereof is disclosed. In some embodiments, the method comprises: administering to the subject an anti-Gal3 antibody or binding fragment thereof, wherein binding of the anti-Gal3 antibody or binding fragment thereof to Gal3 in the subject inhibits Gal3-mediated amyloid aggregation of Serum Amyloid (A) (SAA) in the subject, thereby treating peripheral amyloidosis in the subject.

[0367] In some embodiments, a method of inhibiting Gal3-mediated amyloid aggregation of islet amyloid polypeptide (IAPP) is disclosed. In some embodiments, the method comprises: contacting the protein with an anti-Gal3 antibody or binding fragment thereof, wherein binding of the anti-Gal3 antibody or binding fragment thereof to Gal3 inhibits Gal3-mediated amyloid aggregation of IAPP.

[0368] In some embodiments, a method of treating type 2 diabetes in a subject in need thereof is disclosed. In some embodiments, the method comprises: administering to the subject an anti-Gal3 antibody or binding fragment thereof, wherein binding of the anti-Gal3 antibody or binding fragment thereof to Gal3 in the subject inhibits Gal3-mediated amyloid aggregation of IAPP in the subject, thereby treating type 2 diabetes in the subject.

[0369] In some embodiments, a method of inhibiting Gal3-mediated amyloid aggregation of TAR DNA binding protein 43 (TDP-43) is disclosed. In some embodiments, the method comprises: contacting the protein with an anti-Gal3 antibody or binding fragment thereof, wherein binding of the anti-Gal3 antibody or binding fragment thereof to Gal3 inhibits Gal3-mediated amyloid aggregation of TDP-43.

[0370] In some embodiments, a method of treating amyotrophic lateral sclerosis (ALS) in a subject in need thereof is disclosed. In some embodiments, the method comprises: administering to the subject an anti-Gal3 antibody or binding fragment thereof, wherein binding of the anti-Gal3 antibody or binding fragment thereof to Gal3 in the subject inhibits Gal3-mediated amyloid aggregation of TDP-43 in the subject, thereby treating ALS in the subject.

[0371] In some embodiments, a method of treating frontotemporal lobar degeneration (FTLD) in a subject in need thereof is disclosed. In some embodiments, the method comprises: administering to the subject an anti-Gal3 antibody or binding fragment thereof, wherein binding of the anti-Gal3 antibody or binding fragment thereof to Gal3 in the subject inhibits Gal3-mediated amyloid aggregation of TDP-43 in the subject, thereby treating FTLD in the subject.

[0372] In some embodiments, the amyloid proteopathy is reduced by at least 5%, 10%, 15%, 20%, 25%, 30%, 35%, 40%, 45%, 50%, 55%, 60%, 65%, 70%, 75%, 80%, 85%, 90%, 95%, or 99%, or any percentage within a range defined by any two of the aforementioned percentages, after the administering step relative to the amyloid proteopathy prior to the administering step. In some embodiments, the protein comprises α-synuclein, tau protein, phospho tau, TAR DNA binding protein (TDP-43), transthyretin, uromodulin, islet amyloid polypeptide (IAPP), serum amyloid A (SAA), p53, apolipoprotein E (APOE), APOE-4, prion protein, fibrin, neurofilament light (NFL), CRP, SUMO, light chain, platelet-derived growth factor receptor (PDGFR), melanoma cell adhesion molecule (MCAM), complement protein C3, complement protein C9, lysozyme, insulin, native haemoglobin (Hb), glycosylated haemoglobin (HbAIC), phenylalanine (Phe), glutamine (Gln), cholesteryl (co-esteryl), cholesterol, neuroserpin, crystallin AA, crystallin AB, cystatin-C, myostatin pro-peptide, Atrial Natriuretic Peptide (ANP), B-Type Natriuretic Peptide (BNP), or any combination thereof. In some embodiments, the tau protein is 4R tau, or phosphorylated tau (phospho tau). In some embodiments, the phosphorylated tau is phospho-tau (S396). In some embodiments, the phosphorylated tau forms trimers, tetramers, or higher order oligomers when contacted with Gal3. In some embodiments, the amyloid proteopathy comprises familial Creutzfeldt-Jakob disease (CJD), Alzheimer's disease, CAA, tauopathies, Lewy body disease, multiple system atrophy, atherosclerosis, cardiovascular disease, familial encephalopathy with neuroserpin inclusion bodies (FENIB), insulin-derived amyloidosis, diabetes, type 2 diabetes, diabetes mellitus, kidney disease, prion disease, transmissible spongiform encephalopathy (TSE), human systemic amyloid disease, fatal familial insomnia, Gerstmann-Straussler-Scheinker disease, idiopathic inflammatory myopathies (IIM), transthyretin amyloidosis, heart disease, pre-eclampsia, phenylketonuria, Huntington disease, motor neuron degeneration, cerebrovascular damage, stroke disruption in innate immune system, damage to lenses, blurring of vision, congestive heart failure (CHF), cardiac amyloidosis, medullary carcinoma of the thyroid (MTC), osteoporosis, Paget's disease, peripheral amyloidosis, amyotrophic lateral sclerosis (ALS), frontotemporal lobar degeneration (FTLD), hyperglycemia, light chain amyloidosis (AL), a synucleinopathy, Parkinson's disease, dementia with Lewy bodies, progressive supranuclear palsy, corticobasal degeneration, Pick's disease, TDP-43 proteopathy, TTR amyloidosis (ATTR), uromodulin-associated kidney disease, rheumatoid arthritis, inflammatory arthritis, spondyloarthropathies, juvenile idiopathic arthritis, ankylosing spondylitis, psoriatic arthritis, inflammatory bowel disease, ulcerative colitis, Crohn's disease, celiac disease, vasculitis, sarcoidosis, familial Mediterranean fever, tumor necrosis factor receptor-associated periodic syndrome (TRAPS), cancer, aging promoted by amyloid aggregation, or any combination thereof.

[0373] In some embodiments, the anti-Gal3 antibody or binding fragment thereof comprises (1) a heavy chain variable region comprising a V_{H}-CDR1, a V_{H}-CDR2, and a V_{H}-CDR3; and (2) a light chain variable region comprising a V_{L}-CDR1, a V_{L}-CDR2, and a V_{L}-CDR3. In some embodiments, the V_{H}-CDR1 comprises an amino acid sequence having at least 80%, 81%, 82%, 83%, 84%, 85%, 86%, 87%, 88%, 89%, 90%, 91%, 92%, 93%, 94%, 95%, 96%, 97%, 98%, 99%, or 100% identity to any one of the amino acid sequences of SEQ ID NOs: 27-70. In some embodiments, the V_{H}-CDR2 comprises an amino acid sequence having at least 80%, 81%, 82%, 83%, 84%, 85%, 86%, 87%, 88%, 89%, 90%, 91%, 92%, 93%, 94%, 95%, 96%, 97%, 98%, 99%, or 100% identity to any one of the amino acid sequences of SEQ ID NOs: 71-111, 801, 951, 952. In some embodiments, the V_{H}-CDR3 comprises an amino acid sequence having at least 80%, 81%, 82%, 83%, 84%, 85%, 86%, 87%, 88%, 89%, 90%, 91%, 92%, 93%, 94%, 95%, 96%, 97%, 98%, 99%, or 100% identity to any one of the amino acid sequences of SEQ ID NOs: 112-169, 802, 953, 954. In some embodiments, the V_{L}-CDR1 comprises an amino acid sequence having at least 80%, 81%, 82%, 83%, 84%, 85%, 86%, 87%, 88%, 89%, 90%, 91%, 92%, 93%, 94%, 95%, 96%, 97%, 98%, 99%, or 100% identity to any one of the amino acid sequences of SEQ ID NOs: 170-220. In some embodiments, the V_{L}-CDR2 comprises an amino acid sequence having at least 80%, 81%, 82%, 83%, 84%, 85%, 86%, 87%, 88%, 89%, 90%, 91%, 92%, 93%, 94%, 95%, 96%, 97%, 98%, 99%, or 100% identity to any one of the amino acid sequences of SEQ ID NOs: 211-247. In some embodiments, the V_{L}-CDR3 comprises an amino acid sequence having at least 80%, 81%, 82%, 83%, 84%, 85%, 86%, 87%, 88%, 89%, 90%, 91%, 92%, 93%, 94%, 95%, 96%, 97%, 98%, 99%, or 100% identity to any one of the amino acid sequences of SEQ ID NOs: 248-296. In some embodiments, the anti-Gal3 antibody or binding fragment thereof comprises a combination of the V_{H}-CDR1, V_{H}-CDR2, V_{H}-CDR3, V_{L}-CDR1, V_{L}-CDR2, and V_{L}-CDR3 as illustrated in FIG. 13. In some embodiments, the heavy chain variable region comprises a sequence having at least 80%, 81%, 82%, 83%, 84%, 85%, 86%, 87%, 88%, 89%, 90%, 91%, 92%, 93%, 94%, 95%, 96%, 97%, 98%, or 99% identity to the sequence selected from SEQ ID NOs: 297-373, 803, 806-820, 955-968, 1067-1109, 1415-1439. In some embodiments, the light chain variable region comprises a sequence having at least 80%, 81%, 82%, 83%, 84%, 85%, 86%, 87%, 88%, 89%, 90%, 91%, 92%, 93%, 94%, 95%, 96%, 97%, 98%, or 99% identity to the sequence selected from SEQ ID NOs: 374-447, 821-835, 941-943, 969-982, 1110-1152, 1440-1464. In some embodiments, the anti-Gal3 antibody or binding fragment thereof comprises a heavy chain, wherein the heavy chain comprises a sequence having at least 80%, 81%, 82%, 83%, 84%, 85%, 86%, 87%, 88%, 89%, 90%, 91%, 92%, 93%, 94%, 95%, 96%, 97%, 98%, or 99% identity to the sequence selected from SEQ ID NOs: 448-494, 804, 836-850, 983-996, 1153-1195, 1411, 1465-1489. In some embodiments, the anti-Gal3 antibody or binding fragment thereof comprises a light chain, wherein the light chain comprises a sequence having at least 80%, 81%, 82%, 83%, 84%, 85%, 86%, 87%, 88%, 89%, 90%, 91%, 92%, 93%, 94%, 95%, 96%, 97%, 98%, or 99% identity to the sequence selected from SEQ ID NOs: 495-538, 805, 851-865, 997-1010, 1196-1238, 1412, 1490-1514. In some embodiments, the anti-Gal3 antibody or binding fragment thereof is selected from the group consisting of at least one of: TB001, TB006, 12G5.D7, 13A12.2E5, 14H10.2C9, 15F10.2D6, 19B5.2E6, 20D11.2C6, 20H5.A3, 23H9.2E4, 2D10.2B2, 3B11.2G2, 7D8.2D8, mIMT001, 4A11.2B5, 4A11.H1L1, 4A11.H4L2, 4G2.2G6, 6B3.2D3, 6H6.2D6, 9H2.2H10, 13G4.2F8, 13H12.2F8, 15G7.2A7, 19D9.2E5, 23B10.2B12, 24D12.2H9, F846C.1B2, F846C.1F5, F846C.1H12, F846C.1H5, F846C.2H3, F846TC.14A2, F846TC.14E4, F846TC.16B5, F846TC.7F10, F847C.10B9, F847C.11B1, F847C.12F12, F847C.26F5, F847C.4B10, F849C.8D10, F849C.8H3, 846.2B11, 846.4D5, 846T.1H2, 847.14H4, 846.2D4, 846.2F11, 846T.10B1, 846T.2E3, 846T.4C9, 846T.4E11, 846T.4F5, 846T.8D1, 847.10C9, 847.11D6, 847.15D12, 847.15F9, 847.15H11, 847.20H7, 847.21B11, 847.27B9, 847.28D1, 847.2B8, 847.3B3, 849.1D2, 849.2D7, 849.2F12, 849.4B2, 849.4F12, 849.4F2, 849.5C2, 849.8D12, F847C.21H6, 849.5H1, 847.23F11, 847.16D10, 847.13E2-mH0mL1, 847.13E2-mH0mL2, 847.12C4, 847.4D3, 2D10-VH0-VL0, 2D10-hVH4-HVL1, 2D10-hVH4-HVL2, 2D10-hVH4-HVL3, 2D10-hVH4-HVL4, 2D10-hVH3-HVL1, 2D10-hVH3-HVL2, 2D10-hVH3-HVL3, 2D10-hVH3-HVL4, 20H5.A3-VH3VL1, 20H5.A3-VH3VL3, 20H5.A3-VH4VL1, 20H5.A3-VH5VL1, 20H5.A3-VH5VL3, 20H5.A3-VH6VL1, 20H5.A3-VH6VL3, or binding fragment thereof. In some embodiments, the anti-Gal3 antibody or binding fragment thereof is selected from the group consisting of at least one of: 2D10-VH0-VL0, 2D10-hVH4-HVL1, 2D10-hVH4-HVL2, 2D10-hVH4-HVL3, 2D10-hVH4-HVL4, 2D10-hVH3-HVL1, 2D10-hVH3-HVL2, 2D10-hVH3-HVL3, 2D10-hVH3-HVL4, or binding fragment thereof. In some embodiments, the anti-Gal3 antibody or binding fragment thereof is selected from the group consisting of at least one of: 21H6-H0L0, 21H6-H1L1, 21H6-H1L2, 21H6-H1L3, 21H6-H1L4, 21H6-H2L1, 21H6-H2L2, 21H6-H2L3, 21H6-H2L4, 21H6-H3L1, 21H6-H3L2, 21H6-H3L3, 21H6-H3L4, 21H6-H4L1, 21H6-H4L2, 21H6-H4L3, 21H6-H4L4, 21H6-H5L1, 21H6-H5L2, 21H6-H5L3, 21H6-H5L4, 21H6-H6L1, 21H6-H6L2, 21H6-H6L3, 21H6-H6L4, or binding fragment thereof. In some embodiments, any antibody (human, humanized, or not) that competes for binding to any one or more of the proceeding antibodies (optionally at, at least 80% competition as defined in the present examples, e.g., Example 54), can be used in the method as well. In some embodiments, the antibody binds to the same or overlapping epitope of any one or more of the preceding antibodies.

[0374] As applied to any of the methods of use disclosed herein, in some embodiments, the anti-Gal3 antibody or binding fragment thereof binds to one or more peptides of SEQ ID NOs: 3-26. In some embodiments, the anti-Gal3 antibody or binding fragment thereof binds to an epitope present within a region of Gal3 defined by Peptide 1 (ADNFSLHDALSGSGNPNPQG; SEQ ID NO: 3), Peptide 4 (GAGGYPGASYPGAYPGQAPP; SEQ ID NO: 6), Peptide 6 (GAYPGQAPPGAYPGAPGAYP; SEQ ID NO: 8), Peptide 7 (AYPGAPGAYPGAPAPGVYPG; SEQ ID NO: 9), or a combination thereof. In some embodiments, any of the methods disclosed herein involving an anti-Gal3 antibody or binding fragment can be performed with an antigen binding molecule that binds to Gal3. In some embodiments, any antibody (human, humanized, or not) that competes for binding to any one or more of the proceeding epitopes (optionally at, at least 80% competition as defined in the present examples, e.g., Example 54), can be used in the method as well. In some embodiments, the antibody binds to the same or overlapping epitope of any one or more of the preceding antibodies.

[0375] As applied to any of the methods of use disclosed herein, in some embodiments, the anti-Gal3 antibody or binding fragment thereof binds to an epitope of Gal3 that includes a motif of GxYPG, where x is the amino acids alanine (A), glycine (G), or valine (V). In some embodiments, an anti-Gal3 antibody as described herein binds to an epitope of Gal3 that includes two GxYPG motifs separated by three amino acids, where x is A, G, or V. In some embodiments, any of the methods disclosed herein involving an anti-Gal3 antibody or binding fragment can be performed with an antigen binding molecule that binds to Gal3.

[0376] As applied to any of the methods of use disclosed herein, in some embodiments, the anti-Gal3 antibody or binding fragment thereof comprises (1) a heavy chain variable region comprising a V_{H}-CDR1, a V_{H}-CDR2, and a V_{H}-CDR3 and (2) a light chain variable region comprising a V_{L}-CDR1, a V_{L}-CDR2, and a V_{L}-CDR3. In some embodiments, the V_{H}-CDR1 comprises an amino acid sequence having at least 60%, at least 70%, at least 80%, at least 90%, or 100% sequence identity to any amino acid sequence according to SEQ ID NOs: 27-70. In some embodiments, the V_{H}-CDR2 comprises an amino acid sequence having at least 60%, at least 70%, at least 80%, at least 90%, or 100% sequence identity to any amino acid sequence according to SEQ ID NOs: 71-111, 801, 951, 952. In some embodiments, the V_{H}-CDR3 comprises an amino acid sequence having at least 60%, at least 70%, at least 80%, at least 90%, or 100% sequence identity to any amino acid sequence according to SEQ ID NOs: 112-169, 802, 953, 954. In some embodiments, the V_{L}-CDR1 comprises an amino acid sequence having at least 60%, at least 70%, at least 80%, at least 90%, or 100% sequence identity to any amino acid sequence according to SEQ ID NOs: 170-220. In some embodiments, the V_{L}-CDR2 comprises an amino acid sequence having at least 60%, at least 70%, at least 80%, at least 90%, or 100% sequence identity to any amino acid sequence according to SEQ ID NOs: 211-247. In some embodiments, the V_{L}-CDR3 comprises an amino acid sequence having at least 60%, at least 70%, at least 80%, at least 90%, or 100% sequence identity to any amino acid sequence according to SEQ ID NOs: 248-296. In some embodiments, any of the methods disclosed herein involving an anti-Gal3 antibody or binding fragment can be performed with an antigen binding molecule that binds to Gal3. In some embodiments, any antibody (human, humanized, or not) that competes for binding to any one or more of the proceeding antibodies (optionally at, at least 80% competition as defined in the present examples, e.g., Example 54), can be used in the method as well. In some embodiments, the antibody binds to the same or overlapping epitope of any one or more of the preceding antibodies.

[0377] As applied to any of the methods of use disclosed herein, in some embodiments, exemplary V_{H}-CDR1 sequences are depicted in FIG. 9A. In some embodiments, exemplary V_{H}-CDR2 sequences are depicted in FIG. 9B. In some embodiments, exemplary V_{H}-CDR3 sequences are depicted in FIG. 9C. In some embodiments, exemplary V_{L}-CDR1 sequences are depicted in FIG. 10A. In some embodiments, exemplary V_{L}-CDR2 sequences are depicted in FIG. 10B. In some embodiments, exemplary V_{L}-CDR3 sequences are depicted in FIG. 10C.

[0378] As applied to any of the methods of use disclosed herein, in some embodiments, the heavy chain variable region of any of the anti-Gal3 antibodies or binding fragments thereof disclosed herein comprises an amino acid sequence having at least 75%, 80%, 85%, 90%, 95%, or 100% sequence identity to any sequence according to SEQ ID NOs: 297-373, 803, 806-820, 955-968, 1067-1109, 1415-1439. In some embodiments, the heavy chain variable region of any of the anti-Gal3 antibodies or binding fragments thereof disclosed herein is selected from the group consisting of at least one of SEQ ID NOs: 297-373, 803, 806-820, 955-968, 1067-1109, 1415-1439. In some embodiments, exemplary V_{H} are depicted in FIG. 11. In some embodiments, any of the methods disclosed herein involving an anti-Gal3 antibody or binding fragment can be performed with an antigen binding molecule that binds to Gal3. In some embodiments, any antibody (human, humanized, or not) that competes for binding to any one or more of the proceeding antibodies (optionally at, at least 80% competition as defined in the present examples, e.g., Example 54), can be used in the method as well. In some embodiments, the antibody binds to the same or overlapping epitope of any one or more of the preceding antibodies.

[0379] As applied to any of the methods of use disclosed herein, in some embodiments, the light chain variable region of any of the anti-Gal3 antibodies or binding fragments thereof disclosed herein comprises an amino acid sequence having at least 75%, 80%, 85%, 90%, 95%, or 100% sequence identity to any sequence according to SEQ ID NOs: 374-447, 821-835, 941-943, 969-982, 1110-1152, 1440-1464. In some embodiments, the light chain variable region of any of the anti-Gal3 antibodies or binding fragments thereof disclosed herein is selected from the group consisting of at least one of SEQ ID NOs: 374-447, 821-835, 941-943, 969-982, 1110-1152, 1440-1464. In some embodiments, exemplary V_{L} are depicted in FIG. 12. In some embodiments, any of the methods disclosed herein involving an anti-Gal3 antibody or binding In some embodiments, any antibody (human, humanized, or not) that competes for binding to any one or more of the proceeding antibodies (optionally at, at least 80% competition as defined in the present examples, e.g., Example 54), can be used in the method as well. In some embodiments, the antibody binds to the same or overlapping epitope of any one or more of the preceding antibodies, or binding fragment thereof, can be performed with an antigen binding molecule that binds to Gal3.

[0380] As applied to any of the methods of use disclosed herein, in some embodiments, the anti-Gal3 antibody or binding fragment thereof comprises the heavy chain sequence of any one of SEQ ID NOs: 448-494, 804, 836-850, 983-996, 1153-1195, 1411, 1465-1489. In some embodiments, the anti-Gal3 antibody or binding fragment thereof comprises the light chain sequence of any one of SEQ ID NOs: 495-538, 805, 851-865, 997-1010, 1196-1238, 1412, 1490-1514. In some embodiments, any antibody (human, humanized, or not) that competes for binding to any one or more of the proceeding antibodies (optionally at, at least 80% competition as defined in the present examples, e.g., Example 54), can be used in the method as well. In some embodiments, the antibody binds to the same or overlapping epitope of any one or more of the preceding antibodies.

[0381] As applied to any of the methods of use disclosed herein, in some embodiments, the anti-Gal3 antibody or binding fragment thereof is selected from the group consisting of at least one of: TB001, TB006, 12G5.D7, 13A12.2E5, 14H10.2C9, 15F10.2D6, 19B5.2E6, 20D11.2C6, 20H5.A3, 23H9.2E4, 2D10.2B2, 3B11.2G2, 7D8.2D8, mIMT001, 4A11.2B5, 4A11.H1L1, 4A11.H4L2, 4G2.2G6, 6B3.2D3, 6H6.2D6, 9H2.2H10, 13G4.2F8, 13H12.2F8, 15G7.2A7, 19D9.2E5, 23B10.2B12, 24D12.2H9, F846C.1B2, F846C.1F5, F846C.1H12, F846C.1H5, F846C.2H3, F846TC.14A2, F846TC.14E4, F846TC.16B5, F846TC.7F10, F847C.10B9, F847C.11B1, F847C.12F12, F847C.26F5, F847C.4B10, F849C.8D10, F849C.8H3, 846.2B11, 846.4D5, 846T.1H2, 847.14H4, 846.2D4, 846.2F11, 846T.10B1, 846T.2E3, 846T.4C9, 846T.4E11, 846T.4F5, 846T.8D1, 847.10C9, 847.11D6, 847.15D12, 847.15F9, 847.15H11, 847.20H7, 847.21B11, 847.27B9, 847.28D1, 847.2B8, 847.3B3, 849.1D2, 849.2D7, 849.2F12, 849.4B2, 849.4F12, 849.4F2, 849.5C2, 849.8D12, F847C.21H6, 849.5H1, 847.23F11, 847.16D10, 847.13E2-mH0mL1, 847.13E2-mH0mL2, 847.12C4, 847.4D3, 2D10-VH0-VL0, 2D10-hVH4-HVL1, 2D10-hVH4-HVL2, 2D10-hVH4-HVL3, 2D10-hVH4-HVL4, 2D10-hVH3-HVL1, 2D10-hVH3-HVL2, 2D10-hVH3-HVL3, 2D10-hVH3-HVL4, 20H5.A3-VH3VL1, 20H5.A3-VH3VL3, 20H5.A3-VH4VL1, 20H5.A3-VH5VL1, 20H5.A3-VH5VL3, 20H5.A3-VH6VL1, 20H5.A3-VH6VL3, or binding fragment thereof. In some embodiments, the anti-Gal3 antibody or binding fragment thereof is selected from the group consisting of at least one of: 2D10-VH0-VL0, 2D10-hVH4-HVL1, 2D10-hVH4-HVL2, 2D10-hVH4-HVL3, 2D10-hVH4-HVL4, 2D10-hVH3-HVL1, 2D10-hVH3-HVL2, 2D10-hVH3-HVL3, 2D10-hVH3-HVL4, or binding fragment thereof. In some embodiments, the anti-Gal3 antibody or binding fragment thereof is selected from the group consisting of at least one of: 21H6-H0L0, 21H6-H1L1, 21H6-H1L2, 21H6-H1L3, 21H6-H1L4, 21H6-H2L1, 21H6-H2L2, 21H6-H2L3, 21H6-H2L4, 21H6-H3L1, 21H6-H3L2, 21H6-H3L3, 21H6-H3L4, 21H6-H4L1, 21H6-H4L2, 21H6-H4L3, 21H6-H4L4, 21H6-H5L1, 21H6-H5L2, 21H6-H5L3, 21H6-H5L4, 21H6-H6L1, 21H6-H6L2, 21H6-H6L3, 21H6-H6L4, or binding fragment thereof. In some embodiments, any antibody (human, humanized, or not) that competes for binding to any one or more of the proceeding antibodies (optionally at, at least 80% competition as defined in the present examples, e.g., Example 54), can be used in the method as well. In some embodiments, the antibody binds to the same or overlapping epitope of any one or more of the preceding antibodies.

[0382] As applied to any of the methods of use disclosed herein, in some embodiments, the anti-Gal3 antibody or binding fragment thereof comprises a payload. In some embodiments, the payload is conjugated to the anti-Gal3 antibody or binding fragment thereof. In some embodiments, the payload is a cytotoxic payload, microtubule disrupting agent, DNA modifying agent, Akt inhibitor, polymerase inhibitor, detectable moiety, immunomodulatory agent, immune modulator, immunotoxin, nucleic acid polymer, aptamer, peptide, or any combination thereof. In some embodiments, the payload is a detectable moiety. In some embodiments, any of the methods disclosed herein involving an anti-Gal3 antibody or binding fragment can be performed with an antigen binding molecule that binds to Gal3.

[0383] As applied to any of the methods of use disclosed herein, in some embodiments, the anti-Gal3 antibody or binding fragment thereof is or comprises a humanized antibody. In some embodiments, the anti-Gal3 antibody or binding fragment thereof is or comprises a full-length antibody or a binding fragment thereof. In some embodiments, the anti-Gal3 antibody or binding fragment thereof is or comprises a bispecific antibody or a binding fragment thereof. In some embodiments, the anti-Gal3-antibody or binding fragment thereof is or comprises a monovalent Fab′, a divalent Fab2, a single-chain variable fragment (scFv), a diabody, a minibody, a nanobody, a single-domain antibody (sdAb), or a camelid antibody, or binding fragment thereof. In some embodiments, the anti-Gal3 antibody or binding fragment thereof is or comprises an IgG framework. In some embodiments, the anti-Gal3 antibody or binding fragment thereof is or comprises an IgG1, IgG2, or IgG4 framework. In some embodiments, any of the methods disclosed herein involving an anti-Gal3 antibody or binding fragment can be performed with an antigen binding molecule that binds to Gal3.

[0384] As applied to any of the methods of treatment disclosed herein, in some embodiments, in some embodiments, the anti-Gal3 antibody or binding fragment thereof is administered enterally, orally, intranasally, parenterally, intracranially, subcutaneously, intramuscularly, intradermally, or intravenously, or any combination thereof.

[0385] As applied to any of the methods of treatment disclosed herein, in some embodiments, the anti-Gal3 antibody or binding fragment thereof is formulated for systemic administration. In some embodiments, the anti-Gal3 antibody or binding fragment thereof is formulated for parenteral administration. In some embodiments, more than one anti-Gal3 antibody or binding fragment is administered. In some embodiments, when more than one anti-Gal3 antibody or binding fragment is administered, the more than one anti-Gal3 antibodies or binding fragments thereof may be selected from the anti-Gal3 antibodies or binding fragments thereof disclosed herein. In some embodiments, any of the methods disclosed herein involving an anti-Gal3 antibody or binding fragment can be performed with an antigen binding molecule that binds to Gal3.

[0386] As applied to any of the methods of use or treatment disclosed herein, the subject is a mammal. In some embodiments, the mammal is a human, cat, dog, mouse, rat, hamster, rodent, pig, cow, horse, sheep, or goat. In some embodiments, the mammal is a human.

### Exemplary Anti-Gal3 Antibodies and Binding Fragments Thereof

[0387] Disclosed herein and as applicable to any of the methods or uses disclosed herein are anti-Gal3 antibodies or binding fragments thereof. In some embodiments, the anti-Gal3 antibody or binding fragment thereof binds to the N-terminal domain of Gal3, N-terminus of Gal3, or the tandem repeat domain (TRD) of Gal3. In some embodiments, the anti-Gal3 antibody or binding fragment thereof does not bind to the N-terminus of Gal3, the N-terminal domain of Gal3, or the TRD of Gal3. In some embodiments, the anti-Gal3 antibody or binding fragment thereof binds to the C-terminus of Gal3, the C-terminal domain of Gal3, or the CRD of Gal3. In some embodiments, the anti-Gal3 antibody or binding fragment thereof does not bind to the C-terminus of Gal3, the C-terminal domain of Gal3, or the CRD of Gal3. In some embodiments, any of the anti-Gal3 antibodies or binding fragments thereof or any arrangement of any of the anti-Gal3 antibodies or binding fragments provided herein may be substituted with an antigen binding molecule that binds to Gal3.

[0388] In some embodiments, antibodies or binding fragments thereof are provided. In some embodiments, the antibodies are anti-Gal3 antibodies or binding fragments thereof. In some embodiments, the anti-Gal3 antibodies or binding fragments thereof comprises a heavy chain variable region comprising a V_{H}-CDR1, a V_{H}-CDR2, and a V_{H}-CDR3. In some embodiments, the anti-Gal3 antibodies or binding fragments thereof comprise a light chain variable region comprising a V_{L}-CDR1, a V_{L}-CDR2, and a V_{L}-CDR3. In some embodiments, the V_{H}-CDR1 comprises an amino acid sequence having at least 60%, 61%, 62%, 63%, 64%, 65%, 66%, 67%, 68%, 69%, 70%, 71%, 72%, 73%, 74%, 75%, 76%, 77%, 78%, 79%, 80%, 81%, 82%, 83%, 84%, 85%, 86%, 87%, 88%, 89%, 90%, 91%, 92%, 93%, 94%, 95%, 96%, 97%, 98%, 99%, or 100% sequence identity to any amino acid sequence according to SEQ ID NOs: 27-70. In some embodiments, the V_{H}-CDR2 comprises an amino acid sequence having at least 60%, 61%, 62%, 63%, 64%, 65%, 66%, 67%, 68%, 69%, 70%, 71%, 72%, 73%, 74%, 75%, 76%, 77%, 78%, 79%, 80%, 81%, 82%, 83%, 84%, 85%, 86%, 87%, 88%, 89%, 90%, 91%, 92%, 93%, 94%, 95%, 96%, 97%, 98%, 99%, or 100% sequence identity to any amino acid sequence according to SEQ ID NOs: 71-111, 801, 951, 952. In some embodiments, the V_{H}-CDR3 comprises an amino acid sequence having at least 60%, 61%, 62%, 63%, 64%, 65%, 66%, 67%, 68%, 69%, 70%, 71%, 72%, 73%, 74%, 75%, 76%, 77%, 78%, 79%, 80%, 81%, 82%, 83%, 84%, 85%, 86%, 87%, 88%, 89%, 90%, 91%, 92%, 93%, 94%, 95%, 96%, 97%, 98%, 99%, or 100% sequence identity to any amino acid sequence according to SEQ ID NOs: 112-169, 802, 953, 954. In some embodiments, the V_{L}-CDR1 comprises an amino acid sequence having at least 60%, 61%, 62%, 63%, 64%, 65%, 66%, 67%, 68%, 69%, 70%, 71%, 72%, 73%, 74%, 75%, 76%, 77%, 78%, 79%, 80%, 81%, 82%, 83%, 84%, 85%, 86%, 87%, 88%, 89%, 90%, 91%, 92%, 93%, 94%, 95%, 96%, 97%, 98%, 99%, or 100% sequence identity to any amino acid sequence according to SEQ ID NOs: 170-220. In some embodiments, the V_{L}-CDR2 comprises an amino acid sequence having at least 60%, 61%, 62%, 63%, 64%, 65%, 66%, 67%, 68%, 69%, 70%, 71%, 72%, 73%, 74%, 75%, 76%, 77%, 78%, 79%, 80%, 81%, 82%, 83%, 84%, 85%, 86%, 87%, 88%, 89%, 90%, 91%, 92%, 93%, 94%, 95%, 96%, 97%, 98%, 99%, or 100% sequence identity to any amino acid sequence according to SEQ ID NOs: 211-247. In some embodiments, the V_{L}-CDR3 comprises an amino acid sequence having at least 60%, 61%, 62%, 63%, 64%, 65%, 66%, 67%, 68%, 69%, 70%, 71%, 72%, 73%, 74%, 75%, 76%, 77%, 78%, 79%, 80%, 81%, 82%, 83%, 84%, 85%, 86%, 87%, 88%, 89%, 90%, 91%, 92%, 93%, 94%, 95%, 96%, 97%, 98%, 99%, or 100% sequence identity to any amino acid sequence according to SEQ ID NOs: 248-296. In some embodiments, the antibodies comprise one or more sequences having at least 80%, 81%, 82%, 83%, 84%, 85%, 86%, 87%, 88%, 89%, 90%, 91%, 92%, 93%, 94%, 95%, 96%, 97%, 98%, 99%, or 100% identity to a VL sequence, a VH sequence, a VL/VH pairing, and/or V_{H}-CDR1, V_{H}-CDR2, V_{H}-CDR3, V_{L}-CDR1, V_{L}-CDR2, V_{L}-CDR3 (including 1, 2, 3, 4, or 5 amino acid substitutions of any one or more of these CDRs) set from the heavy chain and light chain sequences as depicted in FIG. 18. In some embodiments, any antibody (human, humanized, or not) that competes for binding to any one or more of the proceeding antibodies (optionally at, at least 80% competition as defined in the present examples, e.g., Example 54), can be used in the method as well. In some embodiments, the antibody binds to the same or overlapping epitope of any one or more of the preceding antibodies.

[0389] In some embodiments, antibodies or binding fragments thereof are provided. In some embodiments, the antibodies are anti-Gal3 antibodies or binding fragments thereof. In some embodiments, the anti-Gal3 antibodies or binding fragments thereof comprises a heavy chain variable region comprising a V_{H}-CDR1, a V_{H}-CDR2, and a V_{H}-CDR3. In some embodiments, the anti-Gal3 antibodies or binding fragments thereof comprise a light chain variable region comprising a V_{L}-CDR1, a V_{L}-CDR2, and a V_{L}-CDR3. In some embodiments, the V_{H}-CDR1 comprises an amino acid sequence having at least 60%, 61%, 62%, 63%, 64%, 65%, 66%, 67%, 68%, 69%, 70%, 71%, 72%, 73%, 74%, 75%, 76%, 77%, 78%, 79%, 80%, 81%, 82%, 83%, 84%, 85%, 86%, 87%, 88%, 89%, 90%, 91%, 92%, 93%, 94%, 95%, 96%, 97%, 98%, 99%, or 100% sequence similarity to any amino acid sequence according to SEQ ID NOs: 27-70. In some embodiments, the V_{H}-CDR2 comprises an amino acid sequence having at least 60%, 61%, 62%, 63%, 64%, 65%, 66%, 67%, 68%, 69%, 70%, 71%, 72%, 73%, 74%, 75%, 76%, 77%, 78%, 79%, 80%, 81%, 82%, 83%, 84%, 85%, 86%, 87%, 88%, 89%, 90%, 91%, 92%, 93%, 94%, 95%, 96%, 97%, 98%, 99%, or 100% sequence similarity to any amino acid sequence according to SEQ ID NOs: 71-111, 801, 951, 952. In some embodiments, the V_{H}-CDR3 comprises an amino acid sequence having at least 60%, 61%, 62%, 63%, 64%, 65%, 66%, 67%, 68%, 69%, 70%, 71%, 72%, 73%, 74%, 75%, 76%, 77%, 78%, 79%, 80%, 81%, 82%, 83%, 84%, 85%, 86%, 87%, 88%, 89%, 90%, 91%, 92%, 93%, 94%, 95%, 96%, 97%, 98%, 99%, or 100% sequence similarity to any amino acid sequence according to SEQ ID NOs: 112-169, 802, 953, 954. In some embodiments, the V_{L}-CDR1 comprises an amino acid sequence having at least 60%, 61%, 62%, 63%, 64%, 65%, 66%, 67%, 68%, 69%, 70%, 71%, 72%, 73%, 74%, 75%, 76%, 77%, 78%, 79%, 80%, 81%, 82%, 83%, 84%, 85%, 86%, 87%, 88%, 89%, 90%, 91%, 92%, 93%, 94%, 95%, 96%, 97%, 98%, 99%, or 100% sequence similarity to any amino acid sequence according to SEQ ID NOs: 170-220. In some embodiments, the V_{L}-CDR2 comprises an amino acid sequence having at least 60%, 61%, 62%, 63%, 64%, 65%, 66%, 67%, 68%, 69%, 70%, 71%, 72%, 73%, 74%, 75%, 76%, 77%, 78%, 79%, 80%, 81%, 82%, 83%, 84%, 85%, 86%, 87%, 88%, 89%, 90%, 91%, 92%, 93%, 94%, 95%, 96%, 97%, 98%, 99%, or 100% sequence similarity to any amino acid sequence according to SEQ ID NOs: 211-247. In some embodiments, the V_{L}-CDR3 comprises an amino acid sequence having at least 60%, 61%, 62%, 63%, 64%, 65%, 66%, 67%, 68%, 69%, 70%, 71%, 72%, 73%, 74%, 75%, 76%, 77%, 78%, 79%, 80%, 81%, 82%, 83%, 84%, 85%, 86%, 87%, 88%, 89%, 90%, 91%, 92%, 93%, 94%, 95%, 96%, 97%, 98%, 99%, or 100% sequence similarity to any amino acid sequence according to SEQ ID NOs: 248-296. In some embodiments, the antibodies comprise one or more sequences having at least 80%, 81%, 82%, 83%, 84%, 85%, 86%, 87%, 88%, 89%, 90%, 91%, 92%, 93%, 94%, 95%, 96%, 97%, 98%, 99%, or 100% similarity to a VL sequence, a VH sequence, a VL/VH pairing, and/or V_{H}-CDR1, V_{H}-CDR2, V_{H}-CDR3, V_{L}-CDR1, V_{L}-CDR2, V_{L}-CDR3 (including 1, 2, 3, 4, or 5 amino acid substitutions of any one or more of these CDRs) set from the heavy chain and light chain sequences as depicted in FIG. 18. In some embodiments, any antibody (human, humanized, or not) that competes for binding to any one or more of the proceeding antibodies (optionally at, at least 80% competition as defined in the present examples, e.g., Example 54), can be used in the method as well. In some embodiments, the antibody binds to the same or overlapping epitope of any one or more of the preceding antibodies.

[0390] In some embodiments, antibodies or binding fragments thereof are provided. In some embodiments, the antibodies or binding fragments thereof are anti-Gal3 antibodies or binding fragments thereof. In some embodiments, the anti-Gal3 antibodies or binding fragments thereof comprises a heavy chain variable region comprising a V_{H}-CDR1, a V_{H}-CDR2, and a V_{H}-CDR3. In some embodiments, the anti-Gal3 antibodies or binding fragments thereof comprise a light chain variable region comprising a V_{L}-CDR1, a V_{L}-CDR2, and a V_{L}-CDR3. In some embodiments, the V_{H}-CDR1 comprises an amino acid sequence having at least 0, 1, 2, 3, 4, 5, or 6 substitutions relative to any amino acid sequence according to SEQ ID NOs: 27-70. In some embodiments, the V_{H}-CDR2 comprises an amino acid sequence having at least 0, 1, 2, 3, 4, 5, or 6 substitutions relative to any amino acid sequence according to SEQ ID NOs: 71-111, 801, 951, 952. In some embodiments, the V_{H}-CDR3 comprises an amino acid sequence having at least 0, 1, 2, 3, 4, 5, or 6 substitutions relative to any amino acid sequence according to SEQ ID NOs: 112-169, 802, 953, 954. In some embodiments, the V_{L}-CDR1 comprises an amino acid sequence having at least 0, 1, 2, 3, 4, 5, or 6 substitutions relative to any amino acid sequence according to SEQ ID NOs: 170-220. In some embodiments, the V_{L}-CDR2 comprises an amino acid sequence having at least 0, 1, 2, 3, 4, 5, or 6 substitutions relative to any amino acid sequence according to SEQ ID NOs: 211-247. In some embodiments, the V_{L}-CDR3 comprises an amino acid sequence having at least 0, 1, 2, 3, 4, 5, or 6 substitutions relative to any amino acid sequence according to SEQ ID NOs: 248-296. In some embodiments, any antibody (human, humanized, or not) that competes for binding to any one or more of the proceeding antibodies (optionally at, at least 80% competition as defined in the present examples, e.g., Example 54), can be used in the method as well. In some embodiments, the antibody binds to the same or overlapping epitope of any one or more of the preceding antibodies.

[0391] In some embodiments, the antibody or binding fragment thereof comprises a combination of a V_{L}-CDR1, a V_{L}-CDR2, a V_{L}-CDR3, a V_{H}-CDR1, a V_{H}-CDR2, and a V_{H}-CDR3 as illustrated in FIG. 16.

[0392] In some embodiments, the antibody or binding fragment thereof comprises a combination of a V_{H}-CDR1, a V_{H}-CDR2, a V_{H}-CDR3, V_{L}-CDR1, a V_{L}-CDR2, and a V_{L}-CDR3, where one or more of these CDRs is defined by a consensus sequence. The consensus sequences provided herein have been derived from the alignments of CDRs depicted in FIG. 25A-B. However, it is envisioned that alternative alignments may be done (e.g. using global or local alignment, or with different algorithms, such as Hidden Markov Models, seeded guide trees, Needleman-Wunsch algorithm, or Smith-Waterman algorithm) and as such, alternative consensus sequences can be derived.

[0393] In some embodiments, the V_{H}-CDR1 is defined by the formula X₁X₂X₃X₄X₅X₆X₇X₈X₉X₁₀, where X₁ is E, G, or R; X₂ is F, N, or Y; X₃ is A, I, K, N, S, or T; X₄ is F, I, or L; X₅ is I, K, N, R, S, or T; X₆ is D, G, I, N, S, or T; X₇ is F, G, H, S, or Y; X₈ is no amino acid, A, D, G, I, M, N, T, V, W, or Y; X₉ is no amino acid, M, or Y; X₁₀ is no amino acid or G; In some embodiments, the V_{H}-CDR1 comprises a sequence having at least 80%, 81%, 82%, 83%, 84%, 85%, 86%, 87%, 88%, 89%, 90%, 91%, 92%, 93%, 94%, 95%, 96%, 97%, 98%, 99%, or 100% identity to this consensus sequence. In some embodiments, the V_{H}-CDR1 comprises a sequence having 0, 1, 2, 3, 4, 5, or 6 substitutions from this consensus sequence.

[0394] In some embodiments, the V_{H}-CDR2 is defined by the formula X₁X₂X₃X₄X₅X₆X₇X₈X₉X₁₀, where X₁ is no amino acid, I, or L; X₂ is no amino acid or R; X₃ is no amino acid, F, I, L, or V; X₄ is A, D, F, H, K, L, N, S, W, or Y; X₅ is A, D, P, S, T, W, or Y; X₆ is D, E, G, H, K, N, S, V, or Y; X₇ is D, E, G, N, S, or T; X₈ is D, G, I, K, N, Q, R, S, V, or Y; X₉ is A, D, E, G, I, K, N, P, S, T, V, or Y; X₁₀ is no amino acid, I, P, S, or T. In some embodiments, the V_{H}-CDR2 comprises a sequence having at least 80%, 81%, 82%, 83%, 84%, 85%, 86%, 87%, 88%, 89%, 90%, 91%, 92%, 93%, 94%, 95%, 96%, 97%, 98%, 99%, or 100% identity to this consensus sequence. In some embodiments, the V_{H}-CDR2 comprises a sequence having 0, 1, 2, 3, 4, 5, or 6 substitutions from this consensus sequence.

[0395] In some embodiments, the V_{H}-CDR3 is defined by the formula X₁X₂X₃X₄X₅X₆X₇X₈X₉X₁₀X₁₁X₁₂X₁₃X₁₄X₁₅X₁₆X₁₇X₁₈X₁₉X₂₀X₂₁X₂₂X₂₃X₂₄X₂₅, where X₁ is no amino acid or A; X₂ is no amino acid, A, R, or Y; X₃ is no amino acid, A, F, H, K, L, R, S, or V; X₄ is no amino acid, A, D, K, N, R, S, or T; X₅ is no amino acid, A, D, G, H, I, L, N, P, R, S, T, V, or Y; X₆ is no amino acid, A, D, G, H, K, N, P, Q, R, S, or Y; X₇ is no amino acid, D, F, G, H, P, R, S, W, or Y; X₈ is no amino acid, A, D, E, G, I, R, or S; X₉ is no amino acid, A, C, D, E, F, G, I, N, R, S, T, V, or Y; X₁₀ is no amino acid, A, D, M, P, R, S, T, V, or Y; X₁₁ is no amino acid, A, D, E, F, L, T, V, or Y; X₁₂ is no amino acid, A, G, L, M, R, or T; X₁₃ is no amino acid, A, D, E, F, G, R, S, T, or V; X₁₄ is no amino acid, A, D, G, L, P, Q, R, S, T, V, or Y; X₁₅ is no amino acid, A, D, G, N, S, V, W, or Y; X₁₆ is no amino acid, A, D, E, F, L, P, T, V, W, or Y; X₁₇ is no amino acid, F, I, L, M, R, or Y; X₁₈ is no amino acid, A, D, G, N, or T; X₁₉ is no amino acid, F, N, S, T, V, or Y; X₂₀ is no amino acid or L; X₂₁ is no amino acid or A; X₂₂ is no amino acid or W; X₂₃ is no amino acid or F; X₂₄ is no amino acid or A; X₂₅ is no amino acid or Y. In some embodiments, the V_{H}-CDR3 comprises a sequence having at least 80%, 81%, 82%, 83%, 84%, 85%, 86%, 87%, 88%, 89%, 90%, 91%, 92%, 93%, 94%, 95%, 96%, 97%, 98%, 99%, or 100% identity to this consensus sequence. In some embodiments, the V_{H}-CDR3 comprises a sequence having 0, 1, 2, 3, 4, 5, or 6 substitutions from this consensus sequence.

[0396] In some embodiments, the V_{L}-CDR1 is defined by the formula X₁X₂X₃X₄X₅X₆X₇X₈X₉X₁₀X₁₁X₁₂X₁₃X₁₄X₁₅X₁₆X₁₇, where X₁ is no amino acid or R; X₂ is no amino acid or S; X₃ is no amino acid, S, or T; X₄ is no amino acid, E, G, K, Q, or R; X₅ is no amino acid, A, D, G, I, N, or S; X₆ is no amino acid, I, L, or V; X₇ is no amino acid, F, L, S, or V; X₈ is no amino acid, D, E, H, N, S, T, or Y; X₉ is no amino acid, D, E, I, K, N, R, S, T, or V; X₁₀ is no amino acid, D, H, N, R, S, or Y; X₁₁ is no amino acid, A, G, N, S, T, or V; X₁₂ is no amino acid, A, I, K, N, Q, T, V, or Y; X₁₃ is no amino acid, D, G, H, K, N, S, T, or Y; X₁₄ is no amino acid, C, F, I, N, S, T, V, or Y; X₁₅ is no amino acid, D, L, N, W, or Y; X₁₆ is no amino acid, N, or D; X₁₇ is no amino acid or D. In some embodiments, the V_{L}-CDR1 comprises a sequence having at least 80%, 81%, 82%, 83%, 84%, 85%, 86%, 87%, 88%, 89%, 90%, 91%, 92%, 93%, 94%, 95%, 96%, 97%, 98%, 99%, or 100% identity to this consensus sequence. In some embodiments, the V_{L}-CDR1 comprises a sequence having 0, 1, 2, 3, 4, 5, or 6 substitutions from this consensus sequence.

[0397] In some embodiments, the V_{L}-CDR2 is defined by the formula X₁X₂X₃X₄X₅X₆X₇X₈, where X₁ is no amino acid, K, L, N, Q, or R; X₂ is no amino acid, A, L, M, or V; X₃ is no amino acid, C, K, or S; X₄ is no amino acid or T; X₅ is no amino acid, A, E, F, G, H, K, Q, R, S, W, or Y; X₆ is no amino acid, A, G, or T; X₇ is no amino acid, I, K, N, S, or T; X₈ is no amino acid, N, or S. In some embodiments, the V_{L}-CDR2 comprises a sequence having at least 80%, 81%, 82%, 83%, 84%, 85%, 86%, 87%, 88%, 89%, 90%, 91%, 92%, 93%, 94%, 95%, 96%, 97%, 98%, 99%, or 100% identity to this consensus sequence. In some embodiments, the V_{L}-CDR2 comprises a sequence having 0, 1, 2, 3, 4, 5, or 6 substitutions from this consensus sequence.

[0398] In some embodiments, the V_{L}-CDR3 is defined by the formula X₁X₂X₃X₄X₅X₆X₇X₈X₉X₁₀, where X₁ is no amino acid, A, E, F, H, L, M, Q, S, V, or W; X₂ is A, H, or Q; X₃ is D, F, G, H, L, M, N, Q, S, T, W, or Y; X₄ is no amino acid or W; X₅ is A, D, I, K, L, N, Q, R, S, T, V, or Y; X₆ is D, E, H, I, K, L, N, Q, S, or T; X₇ is D, F, K, L, N, P, S, T, V, W, or Y; X₈ is H, P, or S; X₉ is F, L, P, Q, R, T, W, or Y; X₁₀ is no amino acid, T, or V. In some embodiments, the V_{L}-CDR3 comprises a sequence having at least 80%, 81%, 82%, 83%, 84%, 85%, 86%, 87%, 88%, 89%, 90%, 91%, 92%, 93%, 94%, 95%, 96%, 97%, 98%, 99%, or 100% identity to this consensus sequence. In some embodiments, the V_{L}-CDR3 comprises a sequence having 0, 1, 2, 3, 4, 5, or 6 substitutions from this consensus sequence.

[0399] In some embodiments, the heavy chain variable region of the anti-Gal3 antibody or binding fragment thereof comprises a sequence having at least 80%, 81%, 82%, 83%, 84%, 85%, 86%, 87%, 88%, 89%, 90%, 91%, 92%, 93%, 94%, 95%, 96%, 97%, 98%, 99%, or 100% identity to the sequence selected from SEQ ID NOs: 297-373, 803, 806-820, 955-968, 1067-1109, 1415-1439. In some embodiments, the light chain variable region of the antibody or binding fragment thereof comprises a sequence having at least 80%, 81%, 82%, 83%, 84%, 85%, 86%, 87%, 88%, 89%, 90%, 91%, 92%, 93%, 94%, 95%, 96%, 97%, 98%, 99%, or 100% identity to the sequence selected from SEQ ID NOs: 374-447, 821-835, 941-943, 969-982, 1110-1152, 1440-1464. In some embodiments, the antibodies or binding fragments thereof are anti-Gal3 antibodies or binding fragments thereof.

[0400] In some embodiments, the heavy chain variable region of the anti-Gal3 antibody or binding fragment thereof comprises a sequence having at least 80%, 81%, 82%, 83%, 84%, 85%, 86%, 87%, 88%, 89%, 90%, 91%, 92%, 93%, 94%, 95%, 96%, 97%, 98%, 99%, or 100% similarity to the sequence selected from SEQ ID NOs: 297-373, 803, 806-820, 955-968, 1067-1109, 1415-1439. In some embodiments, the light chain variable region of the antibody or binding fragment thereof comprises a sequence having at least 80%, 81%, 82%, 83%, 84%, 85%, 86%, 87%, 88%, 89%, 90%, 91%, 92%, 93%, 94%, 95%, 96%, 97%, 98%, 99%, or 100% similarity to the sequence selected from SEQ ID NOs: 374-447, 821-835, 941-943, 969-982, 1110-1152, 1440-1464. In some embodiments, the antibodies or binding fragments thereof are anti-Gal3 antibodies or binding fragments thereof.

[0401] In some embodiments, the antibodies comprise one or more sequences having at least 80%, 81%, 82%, 83%, 84%, 85%, 86%, 87%, 88%, 89%, 90%, 91%, 92%, 93%, 94%, 95%, 96%, 97%, 98%, 99%, or 100% identity to a VL sequence, a VH sequence, a VL/VH pairing, and/or V_{L}-CDR1, V_{L}-CDR2, V_{L}-CDR3, V_{H}-CDR1, V_{H}-CDR2, V_{H}-CDR3 (including 1, 2, 3, 4, or 5 amino acid substitutions of any one or more of these CDRs) set from the heavy chain and light chain sequences as depicted in FIG. 18.

[0402] In some embodiments, antibodies or binding fragments thereof are provided. In some embodiments, the antibodies are anti-Gal3 antibodies or binding fragments thereof. In some embodiments, the anti-Gal3 antibodies or binding fragments thereof comprises a heavy chain variable region comprising a V_{H}-CDR1, a V_{H}-CDR2, and a V_{H}-CDR3. In some embodiments, the anti-Gal3 antibodies or binding fragments thereof comprise a light chain variable region comprising a V_{L}-CDR1, a V_{L}-CDR2, and a V_{L}-CDR3. In some embodiments, the V_{H}-CDR1 comprises one of the amino acid sequences of SEQ ID NOs: 27-70, the V_{H}-CDR2 comprises one of the amino acid sequences of SEQ ID NOs: 71-111, 801, 951, 952, the V_{H}-CDR3 comprises one of the amino acid sequences of SEQ ID NO: 112-169, 802, 953, 954, the V_{L}-CDR1 comprises one of the amino acid sequences of SEQ ID NOs: 170-220, the V_{L}-CDR2 comprises one of the amino acid sequences of SEQ ID NOs: 211-247, the V_{L}-CDR3 comprises one of the amino acid sequences of SEQ ID NOs: 248-296, the heavy chain variable region has a sequence having at least 80%, 81%, 82%, 83%, 84%, 85%, 86%, 87%, 88%, 89%, 90%, 91%, 92%, 93%, 94%, 95%, 96%, 97%, 98%, 99%, or 100% identity to one of the amino acid sequences of SEQ ID NOs: 374-447, 821-835, 969-982, 1110-1152, 1440-1464, and the light chain variable region has a sequence having at least 80%, 81%, 82%, 83%, 84%, 85%, 86%, 87%, 88%, 89%, 90%, 91%, 92%, 93%, 94%, 95%, 96%, 97%, 98%, 99%, or 100% identity to one of the amino acid sequences of SEQ ID NOs: 374-447, 821-835, 927-929.

[0403] In some embodiments, the anti-Gal3 antibody or binding fragment thereof comprises a heavy chain, wherein the heavy chain comprises a sequence having at least 80%, 81%, 82%, 83%, 84%, 85%, 86%, 87%, 88%, 89%, 90%, 91%, 92%, 93%, 94%, 95%, 96%, 97%, 98%, 99%, or 100% identity to the sequence selected from SEQ ID NOs: 448-494, 804, 836-850, 983-996, 1153-1195, 1465-1489. In some embodiments, the antibody or binding fragment thereof comprises a light chain, wherein the light chain comprises a sequence having at least 80%, 81%, 82%, 83%, 84%, 85%, 86%, 87%, 88%, 89%, 90%, 91%, 92%, 93%, 94%, 95%, 96%, 97%, 98%, or 99% identity to the sequence selected from SEQ ID NOs: 495-538, 805, 851-865, 997-1010, 1196-1238, 1490-1514. In some embodiments, the antibodies or binding fragments thereof are anti-Gal3 antibodies or binding fragments thereof.

[0404] In some embodiments, the anti-Gal3 antibody or binding fragment thereof comprises a heavy chain, wherein the heavy chain comprises a sequence having at least 80%, 81%, 82%, 83%, 84%, 85%, 86%, 87%, 88%, 89%, 90%, 91%, 92%, 93%, 94%, 95%, 96%, 97%, 98%, 99%, or 100% similarity to the sequence selected from SEQ ID NOs: 448-494, 804, 836-850, 983-996, 1153-1195, 1465-1489. In some embodiments, the antibody or binding fragment thereof comprises a light chain, wherein the light chain comprises a sequence having at least 80%, 81%, 82%, 83%, 84%, 85%, 86%, 87%, 88%, 89%, 90%, 91%, 92%, 93%, 94%, 95%, 96%, 97%, 98%, or 99% similarity to the sequence selected from SEQ ID NOs: 495-538, 805, 851-865, 997-1010, 1196-1238, 1490-1514. In some embodiments, the antibodies or binding fragments thereof are anti-Gal3 antibodies or binding fragments thereof.

[0405] In some embodiments, antibodies or binding fragments thereof are provided. In some embodiments, the antibodies are anti-Gal3 antibodies or binding fragments thereof. In some embodiments, the anti-Gal3 antibodies or binding fragments thereof comprise a heavy chain variable region and a light chain variable region. In some embodiments, the heavy chain variable region is paired with an IgG4 heavy chain constant domain or an IgG2 heavy chain constant domain. In some embodiments, the IgG4 heavy chain constant domain or IgG2 heavy chain constant domain are human or murine. In some embodiments, the IgG4 heavy chain constant domain comprises a sequence having at least 80%, 81%, 82%, 83%, 84%, 85%, 86%, 87%, 88%, 89%, 90%, 91%, 92%, 93%, 94%, 95%, 96%, 97%, 98%, 99%, or 100% identity to SEQ ID NO: 931. In some embodiments, the IgG4 heavy chain constant domain is an S228P mutant. In some embodiments, the IgG2 heavy chain constant domain comprises a sequence having at least 80%, 81%, 82%, 83%, 84%, 85%, 86%, 87%, 88%, 89%, 90%, 91%, 92%, 93%, 94%, 95%, 96%, 97%, 98%, 99%, or 100% identity to SEQ ID NO: 933 or SEQ ID NO: 934. In some embodiments, the IgG2 heavy chain constant domain is a LALAPG or a LALA mutant. In some embodiments, the light chain variable region is paired with an IgG4 kappa chain constant domain. In some embodiments, the IgG4 kappa chain constant domain comprises a sequence having at least 80%, 81%, 82%, 83%, 84%, 85%, 86%, 87%, 88%, 89%, 90%, 91%, 92%, 93%, 94%, 95%, 96%, 97%, 98%, 99%, or 100% identity to SEQ ID NO: 932. Exemplary heavy chain and light chain constant domains can be found in FIG. 20. In some embodiments, the light chain variable region and/or heavy chain variable region may be selected from those depicted in FIGS. 14 and 15 and/or the combinations of light chain variable region and heavy chain variable region as depicted in FIG. 20. In some embodiments, the light chain variable region and/or heavy chain variable regions comprise one or more CDRs depicted in FIG. 12A-C, 13A-C and/or the combinations of CDRs depicted in FIG. 16. In some embodiments, any antibody (human, humanized, or not) that competes for binding to any one or more of the proceeding antibodies (optionally at, at least 80% competition as defined in the present examples, e.g., Example 54), can be used in the method as well. In some embodiments, the antibody binds to the same or overlapping epitope of any one or more of the preceding antibodies.

[0406] In some embodiments, the antibody or binding fragment thereof is selected from the group consisting of at least one of: TB001, TB006, 12G5.D7, 13A12.2E5, 14H10.2C9, 15F10.2D6, 19B5.2E6, 20D11.2C6, 20H5.A3, 23H9.2E4, 2D10.2B2, 3B11.2G2, 7D8.2D8, mIMT001, 4A11.2B5, 4A11.H1L1, 4A11.H4L2, 4G2.2G6, 6B3.2D3, 6H6.2D6, 9H2.2H10, 13G4.2F8, 13H12.2F8, 15G7.2A7, 19D9.2E5, 23B10.2B12, 24D12.2H9, F846C.1B2, F846C.1F5, F846C.1H12, F846C.1H5, F846C.2H3, F846TC.14A2, F846TC.14E4, F846TC.16B5, F846TC.7F10, F847C.10B9, F847C.11B1, F847C.12F12, F847C.26F5, F847C.4B10, F849C.8D10, F849C.8H3, 846.2B11, 846.4D5, 846T.1H2, 847.14H4, 846.2D4, 846.2F11, 846T.10B1, 846T.2E3, 846T.4C9, 846T.4E11, 846T.4F5, 846T.8D1, 847.10C9, 847.11D6, 847.15D12, 847.15F9, 847.15H11, 847.20H7, 847.21B11, 847.27B9, 847.28D1, 847.2B8, 847.3B3, 849.1D2, 849.2D7, 849.2F12, 849.4B2, 849.4F12, 849.4F2, 849.5C2, 849.8D12, F847C.21H6, 849.5H1, 847.23F11, 847.16D10, 847.13E2-mH0mL1, 847.13E2-mH0mL2, 847.12C4, 847.4D3, 2D10-VH0-VL0, 2D10-hVH4-HVL1, 2D10-hVH4-HVL2, 2D10-hVH4-HVL3, 2D10-hVH4-HVL4, 2D10-hVH3-HVL1, 2D10-hVH3-HVL2, 2D10-hVH3-HVL3, 2D10-hVH3-HVL4, 20H5.A3-VH3VL1, 20H5.A3-VH3VL3, 20H5.A3-VH4VL1, 20H5.A3-VH5VL1, 20H5.A3-VH5VL3, 20H5.A3-VH6VL1, 20H5.A3-VH6VL3, or binding fragment thereof. In some embodiments, the anti-Gal3 antibody or binding fragment thereof is selected from the group consisting of at least one of: 2D10-VH0-VL0, 2D10-hVH4-HVL1, 2D10-hVH4-HVL2, 2D10-hVH4-HVL3, 2D10-hVH4-HVL4, 2D10-hVH3-HVL1, 2D10-hVH3-HVL2, 2D10-hVH3-HVL3, 2D10-hVH3-HVL4, or binding fragment thereof. In some embodiments, the anti-Gal3 antibody or binding fragment thereof is selected from the group consisting of at least one of: 21H6-H0L0, 21H6-H1L1, 21H6-H1L2, 21H6-H1L3, 21H6-H1L4, 21H6-H2L1, 21H6-H2L2, 21H6-H2L3, 21H6-H2L4, 21H6-H3L1, 21H6-H3L2, 21H6-H3L3, 21H6-H3L4, 21H6-H4L1, 21H6-H4L2, 21H6-H4L3, 21H6-H4L4, 21H6-H5L1, 21H6-H5L2, 21H6-H5L3, 21H6-H5L4, 21H6-H6L1, 21H6-H6L2, 21H6-H6L3, 21H6-H6L4, or binding fragment thereof. In some embodiments, any antibody (human, humanized, or not) that competes for binding to any one or more of the proceeding antibodies (optionally at, at least 80% competition as defined in the present examples, e.g., Example 54), can be used in the method as well. In some embodiments, the antibody binds to the same or overlapping epitope of any one or more of the preceding antibodies.

[0407] In some embodiments, the antibody or binding fragment thereof comprises a sequence (e.g. CDR, VL, VH, LC, HC) having at least 80%, 81%, 82%, 83%, 84%, 85%, 86%, 87%, 88%, 89%, 90%, 91%, 92%, 93%, 94%, 95%, 96%, 97%, 98%, 99%, or 100% sequence identity to a sequence of TB001, TB006, 12G5.D7, 13A12.2E5, 14H10.2C9, 15F10.2D6, 19B5.2E6, 20D11.2C6, 20H5.A3, 23H9.2E4, 2D10.2B2, 3B11.2G2, 7D8.2D8, mIMT001, 4A11.2B5, 4A11.H1L1, 4A11.H4L2, 4G2.2G6, 6B3.2D3, 6H6.2D6, 9H2.2H10, 13G4.2F8, 13H12.2F8, 15G7.2A7, 19D9.2E5, 23B10.2B12, 24D12.2H9, F846C.1B2, F846C.1F5, F846C.1H12, F846C.1H5, F846C.2H3, F846TC.14A2, F846TC.14E4, F846TC.16B5, F846TC.7F10, F847C.10B9, F847C.11B1, F847C.12F12, F847C.26F5, F847C.4B10, F849C.8D10, F849C.8H3, 846.2B11, 846.4D5, 846T.1H2, 847.14H4, 846.2D4, 846.2F11, 846T.10B1, 846T.2E3, 846T.4C9, 846T.4E11, 846T.4F5, 846T.8D1, 847.10C9, 847.11D6, 847.15D12, 847.15F9, 847.15H11, 847.20H7, 847.21B11, 847.27B9, 847.28D1, 847.2B8, 847.3B3, 849.1D2, 849.2D7, 849.2F12, 849.4B2, 849.4F12, 849.4F2, 849.5C2, 849.8D12, F847C.21H6, 849.5H1, 847.23F11, 847.16D10, 847.13E2-mH0mL1, 847.13E2-mH0mL2, 847.12C4, 847.4D3, 2D10-VH0-VL0, 2D10-hVH4-HVL1, 2D10-hVH4-HVL2, 2D10-hVH4-HVL3, 2D10-hVH4-HVL4, 2D10-hVH3-HVL1, 2D10-hVH3-HVL2, 2D10-hVH3-HVL3, 2D10-hVH3-HVL4, 20H5.A3-VH3VL1, 20H5.A3-VH3VL3, 20H5.A3-VH4VL1, 20H5.A3-VH5VL1, 20H5.A3-VH5VL3, 20H5.A3-VH6VL1, 20H5.A3-VH6VL3, or binding fragment thereof. In some embodiments, the anti-Gal3 antibody or binding fragment thereof is selected from the group consisting of at least one of: 2D10-VH0-VL0, 2D10-hVH4-HVL1, 2D10-hVH4-HVL2, 2D10-hVH4-HVL3, 2D10-hVH4-HVL4, 2D10-hVH3-HVL1, 2D10-hVH3-HVL2, 2D10-hVH3-HVL3, 2D10-hVH3-HVL4, or binding fragment thereof. In some embodiments, the anti-Gal3 antibody or binding fragment thereof is selected from the group consisting of at least one of: 21H6-H0L0, 21H6-H1L1, 21H6-H1L2, 21H6-H1L3, 21H6-H1L4, 21H6-H2L1, 21H6-H2L2, 21H6-H2L3, 21H6-H2L4, 21H6-H3L1, 21H6-H3L2, 21H6-H3L3, 21H6-H3L4, 21H6-H4L1, 21H6-H4L2, 21H6-H4L3, 21H6-H4L4, 21H6-H5L1, 21H6-H5L2, 21H6-H5L3, 21H6-H5L4, 21H6-H6L1, 21H6-H6L2, 21H6-H6L3, 21H6-H6L4, or binding fragment thereof. In some embodiments, any antibody (human, humanized, or not) that competes for binding to any one or more of the proceeding antibodies (optionally at, at least 80% competition as defined in the present examples, e.g., Example 54), can be used in the method as well. In some embodiments, the antibody binds to the same or overlapping epitope of any one or more of the preceding antibodies.

[0408] In some embodiments, the antibody or binding fragment thereof comprises a sequence (e.g. CDR, VL, VH, LC, HC) having at least 80%, 81%, 82%, 83%, 84%, 85%, 86%, 87%, 88%, 89%, 90%, 91%, 92%, 93%, 94%, 95%, 96%, 97%, 98%, 99%, or 100% sequence similarity to a sequence of TB001, TB006, 12G5.D7, 13A12.2E5, 14H10.2C9, 15F10.2D6, 19B5.2E6, 20D11.2C6, 20H5.A3, 23H9.2E4, 2D10.2B2, 3B11.2G2, 7D8.2D8, mIMT001, 4A11.2B5, 4A11.H1L1, 4A11.H4L2, 4G2.2G6, 6B3.2D3, 6H6.2D6, 9H2.2H10, 13G4.2F8, 13H12.2F8, 15G7.2A7, 19D9.2E5, 23B10.2B12, 24D12.2H9, F846C.1B2, F846C.1F5, F846C.1H12, F846C.1H5, F846C.2H3, F846TC.14A2, F846TC.14E4, F846TC.16B5, F846TC.7F10, F847C.10B9, F847C.11B1, F847C.12F12, F847C.26F5, F847C.4B10, F849C.8D10, F849C.8H3, 846.2B11, 846.4D5, 846T.1H2, 847.14H4, 846.2D4, 846.2F11, 846T.10B1, 846T.2E3, 846T.4C9, 846T.4E11, 846T.4F5, 846T.8D1, 847.10C9, 847.11D6, 847.15D12, 847.15F9, 847.15H11, 847.20H7, 847.21B11, 847.27B9, 847.28D1, 847.2B8, 847.3B3, 849.1D2, 849.2D7, 849.2F12, 849.4B2, 849.4F12, 849.4F2, 849.5C2, 849.8D12, F847C.21H6, 849.5H1, 847.23F11, 847.16D10, 847.13E2-mH0mL1, 847.13E2-mH0mL2, 847.12C4, 847.4D3, 2D10-VH0-VL0, 2D10-hVH4-HVL1, 2D10-hVH4-HVL2, 2D10-hVH4-HVL3, 2D10-hVH4-HVL4, 2D10-hVH3-HVL1, 2D10-hVH3-HVL2, 2D10-hVH3-HVL3, 2D10-hVH3-HVL4, 20H5.A3-VH3VL1, 20H5.A3-VH3VL3, 20H5.A3-VH4VL1, 20H5.A3-VH5VL1, 20H5.A3-VH5VL3, 20H5.A3-VH6VL1, 20H5.A3-VH6VL3, or binding fragment thereof. In some embodiments, the anti-Gal3 antibody or binding fragment thereof is selected from the group consisting of at least one of: 2D10-VH0-VL0, 2D10-hVH4-HVL1, 2D10-hVH4-HVL2, 2D10-hVH4-HVL3, 2D10-hVH4-HVL4, 2D10-hVH3-HVL1, 2D10-hVH3-HVL2, 2D10-hVH3-HVL3, 2D10-hVH3-HVL4, or binding fragment thereof. In some embodiments, the anti-Gal3 antibody or binding fragment thereof is selected from the group consisting of at least one of: 21H6-H0L0, 21H6-H1L1, 21H6-H1L2, 21H6-H1L3, 21H6-H1L4, 21H6-H2L1, 21H6-H2L2, 21H6-H2L3, 21H6-H2L4, 21H6-H3L1, 21H6-H3L2, 21H6-H3L3, 21H6-H3L4, 21H6-H4L1, 21H6-H4L2, 21H6-H4L3, 21H6-H4L4, 21H6-H5L1, 21H6-H5L2, 21H6-H5L3, 21H6-H5L4, 21H6-H6L1, 21H6-H6L2, 21H6-H6L3, 21H6-H6L4, or binding fragment thereof. In some embodiments, any antibody (human, humanized, or not) that competes for binding to any one or more of the proceeding antibodies (optionally at, at least 80% competition as defined in the present examples, e.g., Example 54), can be used in the method as well. In some embodiments, the antibody binds to the same or overlapping epitope of any one or more of the preceding antibodies.

[0409] In some embodiments, the anti-Gal3 antibody or binding fragment thereof binds to specific epitopes within a Gal3 protein. In some embodiments, the anti-Gal3 antibody or binding fragment thereof binds to a specific epitope within a Gal3 protein having an amino acid sequence according to SEQ ID NO: 1-2, provided in FIG. 10. In some embodiments, any antibody (human, humanized, or not) that competes for binding to any one or more of the proceeding antibodies (optionally at, at least 80% competition as defined in the present examples, e.g., Example 54), can be used in the method as well. In some embodiments, the antibody binds to the same or overlapping epitope of any one or more of the preceding antibodies.

[0410] In some embodiments, the anti-Gal3 antibody or binding fragment thereof may bind to at least 1, 2, 3, 4, 5, 6, 7, 8, 9, 10, 11, 12, 13, 14, 15, 16, 17, 18, 19, or 20 amino acid residues within a peptide illustrated in FIG. 11 (SEQ ID NOs: 3-26). In some embodiments, any antibody (human, humanized, or not) that competes for binding to any one or more of the proceeding antibodies (optionally at, at least 80% competition as defined in the present examples, e.g., Example 54), can be used in the method as well. In some embodiments, the antibody binds to the same or overlapping epitope of any one or more of the preceding antibodies.

[0411] In some embodiments, the anti-Gal3 antibody or binding fragment thereof may bind to at least 1, 2, 3, 4, 5, 6, 7, 8, 9, 10, 11, 12, 13, 14, 15, 16, 17, 18, 19, or 20 amino acid residues within amino acid residues 1-20 of SEQ ID NO: 1-2. In some embodiments, the anti-Gal3 antibody or binding fragment thereof may bind to at least 1, 2, 3, 4, 5, 6, 7, 8, 9, 10, 11, 12, 13, 14, 15, 16, 17, 18, 19, or 20 amino acid residues within amino acid residues 31-50 of SEQ ID NO: 1-2. In some embodiments, the anti-Gal3 antibody or binding fragment thereof may bind to at least 1, 2, 3, 4, 5, 6, 7, 8, 9, 10, 11, 12, 13, 14, 15, 16, 17, 18, 19, or 20 amino acid residues within amino acid residues 51-70 of SEQ ID NO: 1-2. In some embodiments, the anti-Gal3 antibody or binding fragment thereof may bind to at least 1, 2, 3, 4, 5, 6, 7, 8, 9, 10, 11, 12, 13, 14, 15, 16, 17, 18, 19, or 20 amino acid residues within amino acid residues 61-80 of SEQ ID NO: 1-2. In some embodiments, any antibody (human, humanized, or not) that competes for binding to any one or more of the proceeding antibodies (optionally at, at least 80% competition as defined in the present examples), can be used in the method as well. In some embodiments, the antibody binds to the same or overlapping epitope of any one or more of the preceding antibodies.

[0412] In some embodiments, the anti-Gal3 antibody or binding fragment thereof may bind to at least 1, 2, 3, 4, 5, 6, 7, 8, 9, 10, 11, 12, 13, 14, 15, 16, 17, 18, 19, or 20 amino acid residues within Peptide 1 (SEQ ID NO: 3), Peptide 4 (SEQ ID NO: 6), Peptide 6 (SEQ ID NO: 8), or Peptide 7 (SEQ ID NO: 9). In some embodiments, the anti-Gal3 antibody or binding fragment thereof may bind to at least 1, 2, 3, 4, 5, 6, 7, 8, 9, 10, 11, 12, 13, 14, 15, 16, 17, 18, 19, or 20 amino acid residues within Peptide 1 (SEQ ID NO: 3). In some embodiments, the anti-Gal3 antibody or binding fragment thereof may bind to at least 1, 2, 3, 4, 5, 6, 7, 8, 9, 10, 11, 12, 13, 14, 15, 16, 17, 18, 19, or 20 amino acid residues within Peptide 4 (SEQ ID NO: 6). In some embodiments, the anti-Gal3 antibody or binding fragment thereof may bind to at least 1, 2, 3, 4, 5, 6, 7, 8, 9, 10, 11, 12, 13, 14, 15, 16, 17, 18, 19, or 20 amino acid residues within Peptide 6 (SEQ ID NO: 8). In some embodiments, the anti-Gal3 antibody or binding fragment thereof may bind to at least 1, 2, 3, 4, 5, 6, 7, 8, 9, 10, 11, 12, 13, 14, 15, 16, 17, 18, 19, or 20 amino acid residues within Peptide 7 (SEQ ID NO: 9). In some embodiments, the anti-Gal3 antibody or binding fragment thereof binds to an epitope present within a region of Gal3 defined by Peptide 1 (SEQ ID NO: 3). In some embodiments, the anti-Gal3 antibody or binding fragment thereof binds to an epitope present within a region of Gal3 defined by Peptide 4 (SEQ ID NO: 6). In some embodiments, the anti-Gal3 antibody or binding fragment thereof binds to an epitope present within a region of Gal3 defined by Peptide 6 (SEQ ID NO: 8). In some embodiments, the anti-Gal3 antibody or binding fragment thereof binds to an epitope present within a region of Gal3 defined by Peptide 7 (SEQ ID NO: 9). In some embodiments, the antibody is one that binds to 1, 2, or all 3 of peptides 1, 6, and/or 7. In some embodiments, any antibody (human, humanized, or not) that competes for binding to any one or more of the proceeding antibodies (optionally at, at least 80% competition as defined in the present examples, e.g., Example 54), can be used in the method as well. In some embodiments, the antibody binds to the same or overlapping epitope of any one or more of the preceding antibodies.

[0413] In some embodiments, an anti-Gal3 antibody or binding fragment thereof as described herein may bind to the N-terminal domain of Gal3 or a portion thereof. In some embodiments, an anti-Gal3 antibody or binding fragment thereof as described herein may bind to an epitope of Gal3 that includes a motif of GxYPG, where x is the amino acids alanine (A), glycine (G), or valine (V). In some embodiments, an anti-Gal3 antibody or binding fragment thereof as described herein may bind to an epitope of Gal3 that includes two GxYPG motifs separated by three amino acids, where x is A, G, or V.

[0414] In some embodiments, the anti-Gal3 antibody or binding fragment thereof binds to Gal3. In some embodiments, the anti-Gal3 antibody or binding fragment thereof binds to the N-terminus of Gal3, the N-terminal domain of Gal3, or the TRD of Gal3. In some embodiments, the anti-Gal3 antibody or binding fragment thereof does not bind to the N-terminus of Gal3, the N-terminal domain of Gal3, or the TRD of Gal3. In some embodiments, the anti-Gal3 antibody or binding fragment thereof binds to the C-terminus of Gal3, the C-terminal domain of Gal3, or the CRD of Gal3. In some embodiments, the anti-Gal3 antibody or binding fragment thereof does not bind to the C-terminus of Gal3, the C-terminal domain of Gal3, or the CRD of Gal3. In some embodiments, the anti-Gal3 antibody or binding fragment thereof binds to Gal3 isoform 1. In some embodiments, the anti-Gal3 antibody or binding fragment thereof binds to the N-terminus of Gal3 isoform 1, the N-terminal domain of Gal3 isoform 1, amino acids 1-111 of Gal3 isoform 1, the TRD of Gal3 isoform 1, or amino acids 36-109 of Gal3 isoform 1. In some embodiments, the anti-Gal3 antibody or binding fragment thereof does not bind to the N-terminus of Gal3 isoform 1, the N-terminal domain of Gal3 isoform 1, amino acids 1-111 of Gal3, the TRD of Gal3 isoform 1, or amino acids 36-109 of Gal3 isoform 1. In some embodiments, the anti-Gal3 antibody or binding fragment thereof binds to the C-terminus of Gal3 isoform 1, the C-terminal domain of Gal3 isoform 1, amino acids 112-250 of Gal3, or the CRD of Gal3. In some embodiments, the anti-Gal3 antibody or binding fragment thereof does not bind to the C-terminus of Gal3 isoform 1, the C-terminal domain of Gal3 isoform 1, amino acids 112-250 of Gal3 isoform 1, or the CRD of Gal3. In some embodiments, the anti-Gal3 antibody or binding fragment thereof binds to the N-terminus of Gal3 isoform 3, the N-terminal domain of Gal3 isoform 3, amino acids 1-125 of Gal3, the TRD of Gal3 isoform 3, or amino acids 50-123 of Gal3 isoform 3. In some embodiments, the anti-Gal3 antibody or binding fragment thereof does not bind to the N-terminus of Gal3 isoform 3, the N-terminal domain of Gal3 isoform 3, amino acids 1-125 of Gal3 isoform 3, the TRD of Gal3, or amino acids 50-123 of Gal3 isoform 3. In some embodiments, the anti-Gal3 antibody or binding fragment thereof binds to the C-terminus of Gal3 isoform 3, the C-terminal domain of Gal3 isoform 3, amino acids 126-264 of Gal3 isoform 3, or the CRD of Gal3. In some embodiments, the anti-Gal3 antibody or binding fragment thereof does not bind to the C-terminus of Gal3 isoform 3, the C-terminal domain of Gal3 isoform 3, amino acids 126-264 of Gal3 isoform 3, or the CRD of Gal3 isoform 3.

[0415] In some embodiments, the interaction between Gal3 and a cell surface marker can be reduced to less than 80%, less than 75%, less than 70%, less than 60%, less than 59%, less than 50%, less than 40%, less than 34%, less than 30%, less than 20%, less than 14%, less than 10%, less than 7%, less than 5%, less than 4%, or less than 1%.

[0416] In some embodiments, the anti-Gal3 antibody or binding fragment thereof binds to Gal3 with a dissociation constant (K_{D}) of less than 1 nM, less than 1.2 nM, less than 2 nM, less than 5 nM, less than 10 nM, less than 13.5 nM, less than 15 nM, less than 20 nM, less than 25 nM, or less than 30 nM. In some embodiments, the anti-Gal3 antibody or binding fragment thereof binds to Gal3 with a K_{D} of less than 1 nM. In some embodiments, the anti-Gal3 antibody or binding fragment thereof binds to Gal3 with a K_{D} of less than 1.2 nM. In some embodiments, the anti-Gal3 antibody or binding fragment thereof binds to Gal3 with a K_{D} of less than 2 nM. In some embodiments, the anti-Gal3 antibody or binding fragment thereof binds to Gal3 with a K_{D} of less than 5 nM. In some embodiments, the anti-Gal3 antibody or binding fragment thereof binds to Gal3 with a K_{D} of less than 10 nM. In some embodiments, the anti-Gal3 antibody or binding fragment thereof binds to Gal3 with a K_{D} of less than 13.5 nM. In some embodiments, the anti-Gal3 antibody or binding fragment thereof binds to Gal3 with a K_{D} of less than 15 nM. In some embodiments, the anti-Gal3 antibody or binding fragment thereof binds to Gal3 with a K_{D} of less than 20 nM. In some embodiments, the anti-Gal3 antibody or binding fragment thereof binds to Gal3 with a K_{D} of less than 25 nM. In some embodiments, the anti-Gal3 antibody or binding fragment thereof binds to Gal3 with a K_{D} of less than 30 nM.

[0417] In some embodiments, the anti-Gal3 antibody or binding fragment thereof comprises any one of the variable heavy chain complementarity-determining region 1 (V_{H}-CDR1) sequences illustrated in FIG. 12A (SEQ ID NOs: 27-70). In some embodiments, the anti-Gal3 antibody comprises a V_{H}-CDR1 sequence having at least 60%, at least 65%, at least 70%, at least 75%, at least 80%, at least 85%, at least 86%, at least 87%, at least 88%, at least 89%, at least 90%, at least 91%, at least 92%, at least 93%, at least 94%, at least 95%, at least 96%, at least 97%, at least 98%, or at least 99% sequence identity to any one of SEQ ID NOs: 27-70. In some embodiments, the anti-Gal3 antibody comprises a V_{H}-CDR1 sequence having at least 60%, at least 65%, at least 70%, at least 75%, at least 80%, at least 85%, at least 86%, at least 87%, at least 88%, at least 89%, at least 90%, at least 91%, at least 92%, at least 93%, at least 94%, at least 95%, at least 96%, at least 97%, at least 98%, or at least 99% sequence similarity to any one of SEQ ID NOs: 27-70. In some embodiments, any antibody (human, humanized, or not) that competes for binding to any one or more of the proceeding antibodies (optionally at, at least 80% competition as defined in the present examples, e.g., Example 54), can be used in the method as well. In some embodiments, the antibody binds to the same or overlapping epitope of any one or more of the preceding antibodies.

[0418] In some embodiments, the anti-Gal3 antibody or binding fragment thereof comprises any one of the variable heavy chain complementarity-determining region 2 (V_{H}-CDR2) sequences illustrated in FIG. 12B (SEQ ID NOs: 71-111, 801, 951, 952). In some embodiments, the anti-Gal3 antibody or binding fragment thereof comprises a V_{H}-CDR2 sequence having at least 60%, at least 65%, at least 70%, at least 75%, at least 80%, at least 85%, at least 86%, at least 87%, at least 88%, at least 89%, at least 90%, at least 91%, at least 92%, at least 93%, at least 94%, at least 95%, at least 96%, at least 97%, at least 98%, or at least 99% sequence identity to any one of SEQ ID NOs: 71-111, 801, 951, 952. In some embodiments, the anti-Gal3 antibody or binding fragment thereof comprises a V_{H}-CDR2 sequence having at least 60%, at least 65%, at least 70%, at least 75%, at least 80%, at least 85%, at least 86%, at least 87%, at least 88%, at least 89%, at least 90%, at least 91%, at least 92%, at least 93%, at least 94%, at least 95%, at least 96%, at least 97%, at least 98%, or at least 99% sequence similarity to any one of SEQ ID NOs: 71-111, 801, 951, 952. In some embodiments, any antibody (human, humanized, or not) that competes for binding to any one or more of the proceeding antibodies (optionally at, at least 80% competition as defined in the present examples, e.g., Example 54), can be used in the method as well. In some embodiments, the antibody binds to the same or overlapping epitope of any one or more of the preceding antibodies.

[0419] In some embodiments, the anti-Gal3 antibody or binding fragment thereof comprises any one of the variable heavy chain complementarity-determining region 3 (V_{H}-CDR3) sequences illustrated in FIG. 12C (SEQ ID NOs: 112-169, 802, 953, 954). In some embodiments, the anti-Gal3 antibody or binding fragment thereof comprises a V_{H}-CDR3 sequence having at least 60%, at least 65%, at least 70%, at least 75%, at least 80%, at least 85%, at least 86%, at least 87%, at least 88%, at least 89%, at least 90%, at least 91%, at least 92%, at least 93%, at least 94%, at least 95%, at least 96%, at least 97%, at least 98%, or at least 99% sequence identity to any one of SEQ ID NOs: 112-169, 802, 953, 954. In some embodiments, the anti-Gal3 antibody or binding fragment thereof comprises a V_{H}-CDR3 sequence having at least 60%, at least 65%, at least 70%, at least 75%, at least 80%, at least 85%, at least 86%, at least 87%, at least 88%, at least 89%, at least 90%, at least 91%, at least 92%, at least 93%, at least 94%, at least 95%, at least 96%, at least 97%, at least 98%, or at least 99% sequence similarity to any one of SEQ ID NOs: 112-169, 802, 953, 954. In some embodiments, any antibody (human, humanized, or not) that competes for binding to any one or more of the proceeding antibodies (optionally at, at least 80% competition as defined in the present examples, e.g., Example 54), can be used in the method as well. In some embodiments, the antibody binds to the same or overlapping epitope of any one or more of the preceding antibodies.

[0420] In some embodiments, the anti-Gal3 antibody or binding fragment thereof comprises any one of the variable light chain complementarity-determining region 1 (V_{L}-CDR1) sequences illustrated in FIG. 13A (SEQ ID NOs: 170-220). In some embodiments, the anti-Gal3 antibody or binding fragment thereof comprises a V_{L}-CDR1 sequence having at least 60%, at least 65%, at least 70%, at least 75%, at least 80%, at least 85%, at least 86%, at least 87%, at least 88%, at least 89%, at least 90%, at least 91%, at least 92%, at least 93%, at least 94%, at least 95%, at least 96%, at least 97%, at least 98%, or at least 99% sequence identity to any one of SEQ ID NOs: 170-220. In some embodiments, the anti-Gal3 antibody or binding fragment thereof comprises a V_{L}-CDR1 sequence having at least 60%, at least 65%, at least 70%, at least 75%, at least 80%, at least 85%, at least 86%, at least 87%, at least 88%, at least 89%, at least 90%, at least 91%, at least 92%, at least 93%, at least 94%, at least 95%, at least 96%, at least 97%, at least 98%, or at least 99% sequence similarity to any one of SEQ ID NOs: 170-220. In some embodiments, any antibody (human, humanized, or not) that competes for binding to any one or more of the proceeding antibodies (optionally at, at least 80% competition as defined in the present examples), can be used in the method as well. In some embodiments, the antibody binds to the same or overlapping epitope of any one or more of the preceding antibodies.

[0421] In some embodiments, the anti-Gal3 antibody or binding fragment thereof comprises any one of the variable light chain complementarity-determining region 2 (V_{L}-CDR2) sequences illustrated in FIG. 13B (SEQ ID NOs: 221-247). In some embodiments, the anti-Gal3 antibody or binding fragment thereof comprises a V_{L}-CDR2 sequence having at least 60%, at least 65%, at least 70%, at least 75%, at least 80%, at least 85%, at least 86%, at least 87%, at least 88%, at least 89%, at least 90%, at least 91%, at least 92%, at least 93%, at least 94%, at least 95%, at least 96%, at least 97%, at least 98%, or at least 99% sequence identity to any one of SEQ ID NOs: 221-247. In some embodiments, the anti-Gal3 antibody or binding fragment thereof comprises a V_{L}-CDR2 sequence having at least 60%, at least 65%, at least 70%, at least 75%, at least 80%, at least 85%, at least 86%, at least 87%, at least 88%, at least 89%, at least 90%, at least 91%, at least 92%, at least 93%, at least 94%, at least 95%, at least 96%, at least 97%, at least 98%, or at least 99% sequence similarity to any one of SEQ ID NOs: 221-247. In some embodiments, any antibody (human, humanized, or not) that competes for binding to any one or more of the proceeding antibodies (optionally at, at least 80% competition as defined in the present examples, e.g., Example 54), can be used in the method as well. In some embodiments, the antibody binds to the same or overlapping epitope of any one or more of the preceding antibodies.

[0422] In some embodiments, the anti-Gal3 antibody or binding fragment thereof comprises any one of the variable light chain complementarity-determining region 3 (V_{L}-CDR3) sequences illustrated in FIG. 13C (SEQ ID NOs: 248-296). In some embodiments, the anti-Gal3 antibody or binding fragment thereof comprises a V_{L}-CDR3 sequence having at least 60%, at least 65%, at least 70%, at least 75%, at least 80%, at least 85%, at least 86%, at least 87%, at least 88%, at least 89%, at least 90%, at least 91%, at least 92%, at least 93%, at least 94%, at least 95%, at least 96%, at least 97%, at least 98%, or at least 99% sequence identity to any one of SEQ ID NOs: 248-296. In some embodiments, the anti-Gal3 antibody or binding fragment thereof comprises a V_{L}-CDR3 sequence having at least 60%, at least 65%, at least 70%, at least 75%, at least 80%, at least 85%, at least 86%, at least 87%, at least 88%, at least 89%, at least 90%, at least 91%, at least 92%, at least 93%, at least 94%, at least 95%, at least 96%, at least 97%, at least 98%, or at least 99% sequence similarity to any one of SEQ ID NOs: 248-296. In some embodiments, any antibody (human, humanized, or not) that competes for binding to any one or more of the proceeding antibodies (optionally at, at least 80% competition as defined in the present examples, e.g., Example 54), can be used in the method as well. In some embodiments, the antibody binds to the same or overlapping epitope of any one or more of the preceding antibodies.

[0423] In some embodiments, the anti-Gal3 antibody or binding fragment thereof comprises a heavy chain variable region (V_{H}) and a light chain variable region (V_{L}). In some embodiments, the V_{H} may comprise a V_{H}-CDR1, a V_{H}-CDR2, and/or a V_{H}-CDR3 selected from any of FIG. 12A-C. In some embodiments, the V_{L} may comprise a V_{L}-CDR1, a V_{L}-CDR2, and/or a V_{L}-CDR3 selected from any of FIG. 13A-C. In some embodiments, the anti-Gal3 antibody or binding fragment thereof comprises CDRs within the V_{H} and V_{L} sequences as illustrated in FIGS. 14 and 15. In some embodiments, any antibody (human, humanized, or not) that competes for binding to any one or more of the proceeding antibodies (optionally at, at least 80% competition as defined in the present examples, e.g., Example 54), can be used in the method as well. In some embodiments, the antibody binds to the same or overlapping epitope of any one or more of the preceding antibodies.

[0424] In some embodiments, the anti-Gal3 antibody or binding fragment thereof comprises a heavy chain variable region (V_{H}) sequence selected from FIG. 14 (SEQ ID NOs: 297-373, 803, 806-820, 955-968, 1067-1109, 1415-1439). In some embodiments, the anti-Gal3 antibody or binding fragment thereof comprises a V_{H}-sequence having at least 60%, at least 65%, at least 70%, at least 75%, at least 80%, at least 85%, at least 86%, at least 87%, at least 88%, at least 89%, at least 90%, at least 91%, at least 92%, at least 93%, at least 94%, at least 95%, at least 96%, at least 97%, at least 98%, or at least 99% sequence identity to any one of SEQ ID NOs: 297-373, 803, 806-820, 955-968, 1067-1109, 1415-1439. In some embodiments, the anti-Gal3 antibody or binding fragment thereof comprises a V_{H}-sequence having at least 60%, at least 65%, at least 70%, at least 75%, at least 80%, at least 85%, at least 86%, at least 87%, at least 88%, at least 89%, at least 90%, at least 91%, at least 92%, at least 93%, at least 94%, at least 95%, at least 96%, at least 97%, at least 98%, or at least 99% sequence similarity to any one of SEQ ID NOs: 297-373, 803, 806-820, 955-968, 1067-1109, 1415-1439. In some embodiments, any antibody (human, humanized, or not) that competes for binding to any one or more of the proceeding antibodies (optionally at, at least 80% competition as defined in the present examples, e.g., Example 54), can be used in the method as well. In some embodiments, the antibody binds to the same or overlapping epitope of any one or more of the preceding antibodies.

[0425] In some embodiments, the anti-Gal3 antibody or binding fragment thereof comprises a light chain variable region (V_{L}) sequence selected from FIG. 12 (SEQ ID NOs: 374-447, 821-835, 969-982, 1110-1152, 1440-1464). In some embodiments, the anti-Gal3 antibody or binding fragment thereof comprises a V_{L} sequence having at least 60%, at least 65%, at least 70%, at least 75%, at least 80%, at least 85%, at least 86%, at least 87%, at least 88%, at least 89%, at least 90%, at least 91%, at least 92%, at least 93%, at least 94%, at least 95%, at least 96%, at least 97%, at least 98%, or at least 99% sequence identity to any one of SEQ ID NOs: 374-447, 821-835, 969-982, 1110-1152, 1440-1464. In some embodiments, the anti-Gal3 antibody or binding fragment thereof comprises a V_{L} sequence having at least 60%, at least 65%, at least 70%, at least 75%, at least 80%, at least 85%, at least 86%, at least 87%, at least 88%, at least 89%, at least 90%, at least 91%, at least 92%, at least 93%, at least 94%, at least 95%, at least 96%, at least 97%, at least 98%, or at least 99% sequence similarity to any one of SEQ ID NOs: 374-447, 821-835, 969-982, 1110-1152, 1440-1464. In some embodiments, any antibody (human, humanized, or not) that competes for binding to any one or more of the proceeding antibodies (optionally at, at least 80% competition as defined in the present examples, e.g., Example 54), can be used in the method as well. In some embodiments, the antibody binds to the same or overlapping epitope of any one or more of the preceding antibodies.

[0426] In some embodiments, the anti-Gal3 antibody or binding fragment thereof comprises a combination of heavy chain variable region and light chain variable region as illustrated in FIG. 17.

[0427] In some embodiments, the anti-Ga13 antibody or binding fragment thereof comprises heavy chain and light chain sequences as illustrated in FIG. 18 (SEQ ID NOs: 448-538, 804-805, 836-865. In some embodiments, any antibody (human, humanized, or not) that competes for binding to any one or more of the proceeding antibodies (optionally at, at least 80% competition as defined in the present examples, e.g., Example 54), can be used in the method as well. In some embodiments, the antibody binds to the same or overlapping epitope of any one or more of the preceding antibodies.

[0428] In some embodiments, the anti-Gal3 antibody or binding fragment thereof is selected from the group of at least one of: TB001, TB006, 12G5.D7, 13A12.2E5, 14H10.2C9, 15F10.2D6, 19B5.2E6, 20D11.2C6, 20H5.A3, 23H9.2E4, 2D10.2B2, 3B11.2G2, 7D8.2D8, mIMT001, 4A11.2B5, 4A11.H1L1, 4A11.H4L2, 4G2.2G6, 6B3.2D3, 6H6.2D6, 9H2.2H10, 13G4.2F8, 13H12.2F8, 15G7.2A7, 19D9.2E5, 23B10.2B12, 24D12.2H9, F846C.1B2, F846C.1F5, F846C.1H12, F846C.1H5, F846C.2H3, F846TC.14A2, F846TC.14E4, F846TC.16B5, F846TC.7F10, F847C.10B9, F847C.11B1, F847C.12F12, F847C.26F5, F847C.4B10, F849C.8D10, F849C.8H3, 846.2B11, 846.4D5, 846T.1H2, 847.14H4, 846.2D4, 846.2F11, 846T.10B1, 846T.2E3, 846T.4C9, 846T.4E11, 846T.4F5, 846T.8D1, 847.10C9, 847.11D6, 847.15D12, 847.15F9, 847.15H11, 847.20H7, 847.21B11, 847.27B9, 847.28D1, 847.2B8, 847.3B3, 849.1D2, 849.2D7, 849.2F12, 849.4B2, 849.4F12, 849.4F2, 849.5C2, 849.8D12, F847C.21H6, 849.5H1, 847.23F11, 847.16D10, 847.13E2-mH0mL1, 847.13E2-mH0mL2, 847.12C4, 847.4D3, 2D10-VH0-VL0, 2D10-hVH4-HVL1, 2D10-hVH4-HVL2, 2D10-hVH4-HVL3, 2D10-hVH4-HVL4, 2D10-hVH3-HVL1, 2D10-hVH3-HVL2, 2D10-hVH3-HVL3, 2D10-hVH3-HVL4, 20H5.A3-VH3VL1, 20H5.A3-VH3VL3, 20H5.A3-VH4VL1, 20H5.A3-VH5VL1, 20H5.A3-VH5VL3, 20H5.A3-VH6VL1, 20H5.A3-VH6VL3, or a binding fragment thereof. In some embodiments, the anti-Gal3 antibody or binding fragment thereof is selected from the group consisting of at least one of: 2D10-VH0-VL0, 2D10-hVH4-HVL1, 2D10-hVH4-HVL2, 2D10-hVH4-HVL3, 2D10-hVH4-HVL4, 2D10-hVH3-HVL1, 2D10-hVH3-HVL2, 2D10-hVH3-HVL3, 2D10-hVH3-HVL4, or binding fragment thereof. In some embodiments, the anti-Gal3 antibody or binding fragment thereof is selected from the group consisting of at least one of: 21H6-H0L0, 21H6-H1L1, 21H6-H1L2, 21H6-H1L3, 21H6-H1L4, 21H6-H2L1, 21H6-H2L2, 21H6-H2L3, 21H6-H2L4, 21H6-H3L1, 21H6-H3L2, 21H6-H3L3, 21H6-H3L4, 21H6-H4L1, 21H6-H4L2, 21H6-H4L3, 21H6-H4L4, 21H6-H5L1, 21H6-H5L2, 21H6-H5L3, 21H6-H5L4, 21H6-H6L1, 21H6-H6L2, 21H6-H6L3, 21H6-H6L4, or binding fragment thereof. In some embodiments, any antibody (human, humanized, or not) that competes for binding to any one or more of the proceeding antibodies (optionally at, at least 80% competition as defined in the present examples, e.g., Example 54), can be used in the method as well. In some embodiments, the antibody binds to the same or overlapping epitope of any one or more of the preceding antibodies.

[0429] In some embodiments, the anti-Gal3 antibody or binding fragment thereof comprises one or more heavy chain variable region CDRs depicted in FIG. 12A-C. In some embodiments, the anti-Gal3 antibody or binding fragment thereof comprises one or more light chain variable region CDRs depicted in FIG. 13A-C. In some embodiments, the anti-Gal3 antibody or binding fragment thereof comprises a heavy chain variable region depicted in FIG. 14. In some embodiments, the anti-Gal3 antibody or binding fragment thereof comprises a light chain variable region depicted in FIG. 15. In some embodiments, the anti-Gal3 antibody or binding fragment thereof comprises a combination of heavy chain variable region and light chain variable region depicted in FIG. 17. In some embodiments, the anti-Gal3 antibody or binding fragment thereof comprises a heavy chain and/or light chain depicted in FIG. 18. In some embodiments, the anti-Gal3 antibody or binding fragment thereof can comprise or include any one or more of the sequences provided in any one or more of FIG. 12A-C, 13A-C, 14, 15, 16, 17, 18, or any one or more of a sequence that is at least 80%, 81%, 82%, 83%, 84%, 85%, 86%, 87%, 88%, 89%, 90%, 91%, 92%, 93%, 94%, 95%, 96%, 97%, 98%, 99% or greater identical thereto. In some embodiments, the anti-Gal3 antibody or binding fragment thereof can comprise or include any one or more of the sequences provided in any one or more of FIG. 12-A-C, 13A-C, 14, 15, 16, 17, 18, or any one or more of a sequence that is at least 80%, 81%, 82%, 83%, 84%, 85%, 86%, 87%, 88%, 89%, 90%, 91%, 92%, 93%, 94%, 95%, 96%, 97%, 98%, 99% or greater similar thereto. In some embodiments, any antibody (human, humanized, or not) that competes for binding to any one or more of the proceeding antibodies (optionally at, at least 80% competition as defined in the present examples, e.g., Example 54), can be used in the method as well. In some embodiments, the antibody binds to the same or overlapping epitope of any one or more of the preceding antibodies.

[0430] In some embodiments, the anti-Gal3 antibody or binding fragment thereof comprises a humanized antibody or binding fragment thereof. In other instances, the anti-Gal3 antibody or binding fragment thereof comprises a chimeric antibody or binding fragment thereof. In some embodiments, the anti-Gal3 antibody comprises a full-length antibody or a binding fragment thereof. In some embodiments, the anti-Gal3 antibody or binding fragment thereof comprises a bispecific antibody or a binding fragment thereof. In some embodiments, the anti-Gal3 antibody or binding fragment thereof comprises a monovalent Fab′, a divalent Fab2, a single-chain variable fragment (scFv), a diabody, a minibody, a nanobody, a single-domain antibody (sdAb), or a camelid antibody or binding fragment thereof.

[0431] In some embodiments, the anti-Gal3 antibody or binding fragment thereof is a bispecific antibody or binding fragment thereof. Exemplary bispecific antibody formats include, but are not limited to, Knobs-into-Holes (KiH), Asymmetric Re-engineering Technology-immunoglobulin (ART-Ig), Triomab quadroma, bispecific monoclonal antibody (BiMAb, BsmAb, BsAb, bsMab, BS-Mab, or Bi-MAb), Azymetric, Biclonics, Fab-scFv-Fc, Two-in-one/Dual Action Fab (DAF), FinomAb, scFv-Fc-(Fab)-fusion, Dock-aNd-Lock (DNL), Tandem diAbody (TandAb), Dual-affinity-ReTargeting (DART), nanobody, triplebody, tandems scFv (taFv), triple heads, tandem dAb/VHH, triple dAb/VHH, or tetravalent dAb/VHH. In some embodiments, the anti-Gal3 antibody or binding fragment thereof is a bispecific antibody or binding fragment thereof comprising a bispecific antibody format illustrated in Brinkmann and Kontermann, “The making of bispecific antibodies,” MABS 9(2): 182-212 (2017).

[0432] In some embodiments, the anti-Gal3 antibody or binding fragment thereof can comprise an IgM, IgG (e.g., IgG1, IgG2, IgG3, or IgG4), IgA, or IgE framework. The IgG framework can be IgG1, IgG2, IgG3 or IgG4. In some embodiments, the anti-Gal3 antibody or binding fragment thereof comprises an IgG1 framework. In some embodiments, the anti-Gal3 antibody or binding fragment thereof comprises an IgG2 framework. In some embodiments, the anti-Gal3 antibody or binding fragment thereof comprises an IgG4 framework. The anti-Gal3 antibody or binding fragment thereof can further comprise a Fc mutation.

[0433] In some embodiments, the Fc region comprises one or more mutations that modulate Fc receptor interactions, e.g., to enhance effector functions such as ADCC and/or CDC. In such instances, exemplary residues when mutated modulate effector functions include S239, K326, A330, 1332, or E333, in which the residue position correspond to IgG1 and the residue numbering is in accordance to Kabat numbering (EU index of Kabat et al 1991 Sequences of Proteins of Immunological Interest). In some embodiments, the one or more mutations comprise S239D, K326W, A330L, 1332E, E333A, E333S, or a combination thereof. In some embodiments, the one or more mutations comprise S239D, 1332E, or a combination thereof. In some embodiments, the one or more mutations comprise S239D, A330L, 1332E, or a combination thereof. In some embodiments, the one or more mutations comprise K326W, E333S, or a combination thereof. In some embodiments, the mutation comprises E333A.

[0434] In some embodiments, an anti-Gal3 antibody or binding fragment thereof comprises a humanization score of above 70, above 80, above 81, above 82, above 83, above 84, above 85, above 86, above 87, above 88, above 89, above 90, or above 95. In some embodiments, the anti-Gal3 antibody or binding fragment thereof comprises a humanization score of above 80. In some embodiments, the anti-Gal3 antibody or binding fragment thereof comprises a humanization score of above 83. In some embodiments, the anti-Gal3 antibody or binding fragment thereof comprises a humanization score of above 85. In some embodiments, the anti-Gal3 antibody or binding fragment thereof comprises a humanization score of above 87. In some embodiments, the anti-Gal3 antibody or binding fragment thereof comprises a humanization score of above 90. In some embodiments, the anti-Gal3 antibody or binding fragment thereof comprises a humanization score of the heavy chain of above 70, above 80, above 81, above 82, above 83, above 84, above 85, above 86, above 87, above 88, above 89, above 90, or above 95, optionally above 80, above 85, or above 87. In some embodiments, the anti-Gal3 antibody or binding fragment thereof comprises a humanization score of the light chain of above 70, above 80, above 81, above 82, above 83, above 84, above 85, above 86, above 87, above 88, above 89, above 90, or above 95, optionally above 80, above 83, or above 85.

[0435] Also disclosed herein are proteins. In some embodiments, the proteins comprise one or more of SEQ ID NOs: 27-538, 801-865, 955-1010, 1067-1238, 1415-1514. In some embodiments, the proteins comprise a sequence having at least 80%, 81%, 82%, 83%, 84%, 85%, 86%, 87%, 88%, 89%, 90%, 91%, 92%, 93%, 94%, 95%, 96%, 97%, 98%, 99%, or 100% identity to one or more of SEQ ID NOs: 27-538, 801-865, 955-1010, 1067-1238, 1415-1514. In some embodiments, the proteins comprise a sequence having at least 0, 1, 2, 3, 4, 5, or 6 substitutions relative to any one or more sequences of SEQ ID NOs: 27-538, 801-865, 955-1010, 1067-1238, 1415-1514. In some embodiments, the proteins comprise six sequences selected from each of SEQ ID NOs: 27-70; SEQ ID NOs: 71-111, 801, 951, 952; SEQ ID NOs: 112-169, 802, 953, 954; SEQ ID NOs: 170-220; SEQ ID NOs: 211-247; SEQ ID NOs: 248-296. In some embodiments, the proteins comprise two sequences selected from each of SEQ ID NOs: 297-373, 803, 806-820, 940, 955-968, 1067-1109, 1415-1439, and SEQ ID NOs: 374-447, 821-835, 941-943, 969-982, 1110-1152, 1440-1464. In some embodiments, any antibody (human, humanized, or not) that competes for binding to any one or more of the proceeding antibodies (optionally at, at least 80% competition as defined in the present examples, e.g., Example 54), can be used in the method as well. In some embodiments, the antibody binds to the same or overlapping epitope of any one or more of the preceding antibodies.

[0436] In some embodiments, the proteins comprise two sequences selected from each of SEQ ID NOs: 448-494, 804, 836-850 and SEQ ID NOs: 495-538, 805, 851-865, 997-1010, 1196-1238, 1412, 1490-1514. In some embodiments, the proteins comprise any one or more of the sequences depicted in FIG. 12A-C, 13A-C, 14, 15, 16, 17, 18. In some embodiments, any antibody (human, humanized, or not) that competes for binding to any one or more of the proceeding antibodies (optionally at, at least 80% competition as defined in the present examples, e.g., Example 54), can be used in the method as well. In some embodiments, the antibody binds to the same or overlapping epitope of any one or more of the preceding antibodies.

[0437] In some embodiments, the protein comprises one or more sequences defined by a consensus sequence. The consensus sequences provided herein have been derived from the alignments of CDRs depicted in FIG. 25A-B. However, it is envisioned that alternative alignments may be done (e.g. using global or local alignment, or with different algorithms, such as Hidden Markov Models, seeded guide trees, Needleman-Wunsch algorithm, or Smith-Waterman algorithm) and as such, alternative consensus sequences can be derived.

[0438] In some embodiments, the protein comprises a sequence defined by the formula X₁X₂X₃X₄X₅X₆X₇X₈X₉X₁₀X₁₁X₁₂X₁₃X₁₄X₁₅X₁₆X₁₇, where X₁ is no amino acid or R; X₂ is no amino acid or S; X₃ is no amino acid, S, or T; X₄ is no amino acid, E, G, K, Q, or R; X₅ is no amino acid, A, D, G, I, N, or S; X₆ is no amino acid, I, L, or V; X₇ is no amino acid, F, L, S, or V; X₈ is no amino acid, D, E, H, N, S, T, or Y; X₉ is no amino acid, D, E, I, K, N, R, S, T, or V; X₁₀ is no amino acid, D, H, N, R, S, or Y; X₁₁ is no amino acid, A, G, N, S, T, or V; X₁₂ is no amino acid, A, I, K, N, Q, T, V, or Y; X₁₃ is no amino acid, D, G, H, K, N, S, T, or Y; X₁₄ is no amino acid, C, F, I, N, S, T, V, or Y; X₁₅ is no amino acid, D, L, N, W, or Y; X₁₆ is no amino acid, N, or D; X₁₇ is no amino acid or D. In some embodiments, the protein comprises a sequence having at least 80%, 81%, 82%, 83%, 84%, 85%, 86%, 87%, 88%, 89%, 90%, 91%, 92%, 93%, 94%, 95%, 96%, 97%, 98%, 99%, or 100% identity to this consensus sequence. In some embodiments, the protein comprises a sequence having 0, 1, 2, 3, 4, 5, or 6 substitutions from this consensus sequence.

[0439] In some embodiments, the protein comprises a sequence defined by the formula X₁X₂X₃X₄X₅X₆X₇X₈, where X₁ is no amino acid, K, L, N, Q, or R; X₂ is no amino acid, A, L, M, or V; X₃ is no amino acid, C, K, or S; X₄ is no amino acid or T; X₅ is no amino acid, A, E, F, G, H, K, Q, R, S, W, or Y; X₆ is no amino acid, A, G, or T; X₇ is no amino acid, I, K, N, S, or T; X₈ is no amino acid, N, or S. In some embodiments, the protein comprises a sequence having at least 80%, 81%, 82%, 83%, 84%, 85%, 86%, 87%, 88%, 89%, 90%, 91%, 92%, 93%, 94%, 95%, 96%, 97%, 98%, 99%, or 100% identity to this consensus sequence. In some embodiments, the protein comprises a sequence having 0, 1, 2, 3, 4, 5, or 6 substitutions from this consensus sequence.

[0440] In some embodiments, the protein comprises a sequence defined by the formula X₁X₂X₃X₄X₅X₆X₇X₈X₉X₁₀, where X₁ is no amino acid, A, E, F, H, L, M, Q, S, V, or W; X₂ is A, H, or Q; X₃ is D, F, G, H, L, M, N, Q, S, T, W, or Y; X₄ is no amino acid or W; X₅ is A, D, I, K, L, N, Q, R, S, T, V, or Y; X₆ is D, E, H, I, K, L, N, Q, S, or T; X₇ is D, F, K, L, N, P, S, T, V, W, or Y; X₈ is H, P, or S; X₉ is F, L, P, Q, R, T, W, or Y; X₁₀ is no amino acid, T, or V. In some embodiments, the protein comprises a sequence having at least 80%, 81%, 82%, 83%, 84%, 85%, 86%, 87%, 88%, 89%, 90%, 91%, 92%, 93%, 94%, 95%, 96%, 97%, 98%, 99%, or 100% identity to this consensus sequence. In some embodiments, the protein comprises a sequence having 0, 1, 2, 3, 4, 5, or 6 substitutions from this consensus sequence.

[0441] In some embodiments, the protein comprises a sequence defined by the formula X₁X₂X₃X₄X₅X₆X₇X₈X₉X₁₀, where X₁ is E, G, or R; X₂ is F, N, or Y; X₃ is A, I, K, N, S, or T; X₄ is F, I, or L; X₅ is I, K, N, R, S, or T; X₆ is D, G, I, N, S, or T; X₇ is F, G, H, S, or Y; X₈ is no amino acid, A, D, G, I, M, N, T, V, W, or Y; X₉ is no amino acid, M, or Y; X₁₀ is no amino acid or G; In some embodiments, the protein comprises a sequence having at least 80%, 81%, 82%, 83%, 84%, 85%, 86%, 87%, 88%, 89%, 90%, 91%, 92%, 93%, 94%, 95%, 96%, 97%, 98%, 99%, or 100% identity to this consensus sequence. In some embodiments, the protein comprises a sequence having 0, 1, 2, 3, 4, 5, or 6 substitutions from this consensus sequence.

[0442] In some embodiments, the protein comprises a sequence defined by the formula X₁X₂X₃X₄X₅X₆X₇X₈X₉X₁₀, where X₁ is no amino acid, I, or L; X₂ is no amino acid or R; X₃ is no amino acid, F, I, L, or V; X₄ is A, D, F, H, K, L, N, S, W, or Y; X₅ is A, D, P, S, T, W, or Y; X₆ is D, E, G, H, K, N, S, V, or Y; X₇ is D, E, G, N, S, or T; X₈ is D, G, I, K, N, Q, R, S, V, or Y; X₉ is A, D, E, G, I, K, N, P, S, T, V, or Y; X₁₀ is no amino acid, I, P, S, or T. In some embodiments, the protein comprises a sequence having at least 80%, 81%, 82%, 83%, 84%, 85%, 86%, 87%, 88%, 89%, 90%, 91%, 92%, 93%, 94%, 95%, 96%, 97%, 98%, 99%, or 100% identity to this consensus sequence. In some embodiments, the protein comprises a sequence having 0, 1, 2, 3, 4, 5, or 6 substitutions from this consensus sequence.

[0443] In some embodiments, the protein comprises a sequence defined by the formula X₁X₂X₃X₄X₅X₆X₇X₈X₉X₁₀X₁₁X₁₂X₁₃X₁₄X₁₅X₁₆X₁₇X₁₈X₁₉X₂₀X₂₁X₂₂X₂₃X₂₄X₂₅, where X₁ is no amino acid or A; X₂ is no amino acid, A, R, or Y; X₃ is no amino acid, A, F, H, K, L, R, S, or V; X₄ is no amino acid, A, D, K, N, R, S, or T; X₅ is no amino acid, A, D, G, H, I, L, N, P, R, S, T, V, or Y; X₆ is no amino acid, A, D, G, H, K, N, P, Q, R, S, or Y; X₇ is no amino acid, D, F, G, H, P, R, S, W, or Y; X₈ is no amino acid, A, D, E, G, I, R, or S; X₉ is no amino acid, A, C, D, E, F, G, I, N, R, S, T, V, or Y; X₁₀ is no amino acid, A, D, M, P, R, S, T, V, or Y; X₁₁ is no amino acid, A, D, E, F, L, T, V, or Y; X₁₂ is no amino acid, A, G, L, M, R, or T; X₁₃ is no amino acid, A, D, E, F, G, R, S, T, or V; X₁₄ is no amino acid, A, D, G, L, P, Q, R, S, T, V, or Y; X₁₅ is no amino acid, A, D, G, N, S, V, W, or Y; X₁₆ is no amino acid, A, D, E, F, L, P, T, V, W, or Y; X₁₇ is no amino acid, F, I, L, M, R, or Y; X₁₅ is no amino acid, A, D, G, N, or T; X₁₉ is no amino acid, F, N, S, T, V, or Y; X₂₀ is no amino acid or L; X₂₁ is no amino acid or A; X₂₂ is no amino acid or W; X₂₃ is no amino acid or F; X₂₄ is no amino acid or A; X₂₅ is no amino acid or Y. In some embodiments, the protein comprises a sequence having at least 80%, 81%, 82%, 83%, 84%, 85%, 86%, 87%, 88%, 89%, 90%, 91%, 92%, 93%, 94%, 95%, 96%, 97%, 98%, 99%, or 100% identity to this consensus sequence. In some embodiments, the protein comprises a sequence having 0, 1, 2, 3, 4, 5, or 6 substitutions from this consensus sequence. In some embodiments, any antibody (human, humanized, or not) that competes for binding to any one or more of the proceeding antibodies (optionally at, at least 80% competition as defined in the present examples, e.g., Example 54), can be used in the method as well. In some embodiments, the antibody binds to the same or overlapping epitope of any one or more of the preceding antibodies.

[0444] In some embodiments, any antibody (human, humanized, or not) that competes for binding to any one or more of the proceeding antibodies (optionally at, at least 80% competition as defined in the present examples, e.g., Example 54), can be used in the method as well. In some embodiments, the antibody binds to the same or overlapping epitope of any one or more of the preceding antibodies. In some embodiments, the 80% competition is determined as follows:
[0445] A) Ab (such as TB006 for example) is coated onto surface.
[0446] B) Enzyme linked antibodies already bound by Gal3 antibodies (those that one wishes to determine if the Ab competes with, for example TB006—the “potentially competing Ab”) are added to the Elisa plate.
[0447] C) The ELISA plate is incubated then washed (to remove any unbound Gal3 bound by the potentially competing Ab).
[0448] D) The plate is then collected. Where the potentially competing Ab bound to Gal3 still allows binding to the immobilized Ab (E.g., TB006), then the Ab do not compete. Where it does not (or does so less that fully) then there is that amount of competition.

[0449] In some embodiments, the 80% competition value can be determined as outlined in Example 54 herein. In some embodiments, the 80% competition value can be determined as follows: Ab like TB006 is diluted and coated onto an ELISA plate. The plate is incubated and, after incubation, the plate is washed a blocking solution is applied and the plate is incubated again. Following incubation, the blocking solution is removed. Any competing antibody to be tested is mixed with Flag-tagged Gal-3 protein in binding solutions and applied to the Elisa. The plate is incubated and then washed. Afterwards, HRP-conjugated anti-FLAG Gal3 antibodies are added to the plate. The plate is incubated then washed. If the anti-gal3 blocking antibody competes for binding with the anti-Gal3 antibody like TB006, then HRP-conjugated anti-FLAG Gal3 will not be detectable following the wash. If the anti-gal3 blocking antibody does not compete for binding with the anti-Gal3 antibody, then HRP-conjugated anti-FLAG Gal3 will be detectable, or will be detectable to a lesser level following the wash. The plate is then developed and read in a plate reader. Data can be analyzed and/or graphed using any appropriate means.

[0450] A human or humanized antibody that competes for binding to GAL3 with TB006, wherein the antibody competes at a level of at least 80% competition. In some embodiments, the antibody is not one or any of: F847C.21H6 ((VH: QIQLVQSGPELKKPGETVKISCKASGYTFTIFGMNWVKQAPGKGLKWMGWVNTYT GEPTYADDFKGRFAFSLETSASTAYLQINNLKNEDTATYFCARGWFAYWGQGTLVT VSA (SEQ ID NO: 367); VL: DVVMTQTPLTLSVTIGQPASISCKSSRSLLDSDGKTYLNWLLQRPGQSPKRLIYLVSK LDSGVPDRFTGSGSGTDFTLKISRVEAEDLGVYYCWQGTHFPQTFGGGTKLEIN (SEQ ID NO:440)), F846TC.14A2 (VH: QIQLVQSGPELKKPGETVKISCKASGYTFTNYGMNWVKQAPGKGLKWMGWINTYT GEPTYAGDLKGRFAFSLETSASTAYLQINNLKNEDTATYFCVRYTMDYWGQGTSVT VSS (SEQ ID NO: 326); VL: QAVVTQESALTTSPGETVTLTCRSSTGAVTTSNYANWVQEKPDHLFTGLIGGINNRV PGVPARFSGSLIGDKAALTITGAQTEDEAIYFCALWYSNHWVFGGGTKLTVL (SEQ ID NO:403)), F847C.12F12 (VH: QIQLVQSGPELKKPGETVKISCKASGYTFTNYGMNWVKQAPGKGLKWMGWINTYT GEPTYVDDFKGRFAFSLETSASTAYLRINNLKNEDTATYFCAKFGNYVGAMDYWGQ GTSVTVSS (SEQ ID NO:343); VL: DIQVIQSPSSLSASLGDTITITCHASQNINVWLSWYQQKPGNIPKLLIYKASNLHTGVP SRFSGSGSGTGFTLTISSLQPEDIATYYCQQGQSYPYTFGGGTKLELK (SEQ ID NO:409)), F846T.16B5 (VH: QIQLVQSGPELKKPGETVKISCKASGYTFTNYGMNWVKQAPGKGLKWMGWINTYT GEPAYADDFKGRFAFSLETSASTAYLQINNLKNEDMATYFCARWGGYDGDYYAMD YWGQGTSVTVSS (SEQ ID NO:328); VL: NIMMTQSPSSLAVSAGEKVTMSCKSSQSVLYSSNQKNYLAWYQQKPGQSPKLLIYW ASTRESGVPDRFTGSGSGTDFTLTISSVQAEDLAVYYCHQYLSSLTFGAGTKLELK (SEQ ID NO:405)), F846C.2H3 (VH: QIQLVQSGPELKKPGETVKISCKASGYTFTNYGMNWVKQAPGKGLKWMGWINTYT GEPSYADDFKGRFAFSLETSASTAYLQINNLKNEDMATYFCARWGGYDGDYYAMD YWGQGTSVTVSS (SEQ ID NO:323); VL: NIMMTQSPSSLAVSAGEKVTMSCKSSQSVLYSSNQKNYLAWYQQKPGQSPKLLIYW ASTRESGVPDRFTGSGSGTDFTLTISSVQPEDLAVYYCHQYLSSLTFGAGTKLELK (SEQ ID NO:400)), F846C.1F5 (VH: QIQLVQSGPELKKPGETVKISCKASGYTFTNYGMNWVKQAPGKGLKWMGWINTYT GEPSYADDFKGRFAFSLETSASTAYLQINNLKNEDMATYFCARWGGYDGDYYAMD YWGQGTSVTVSS (SEQ ID NO:323); VL: NIMMTQSPSSLAVSAGEKVTMSCKSSQSVLYSSNQKNYLAWYQQKPGQSPKLLIYW ASTRESGVPDRFTGSGSGTDFTLTISSVQPEDLAVYYCHQYLSSLTFGAGTKLELK (SEQ ID NO: 400)), TB001 (VH: QVQLVQSGSELKKPGASVKVSCKASGYTFTNYGMNWVRQAPGQGLKWMGWINTN TGEPTYVEEFTGRFVFSLETSVSTAYLQISSLKAEDTAVYFCAPYDNFFAYWGQGTT VTVSS (SEQ ID NO: 297); VL: DIVLTQSPLSLPVTPGEPASISCRSSKSLLYKDGKTYLNWFLQKPGQSPQLLIYLMSTH ASGVPDRFSGSGSGTDFTLKISRVEAEDVGVYYCQQLVDYPLTFGGGTKLEIK (SEQ ID NO: 374)), or Synagis-hIgG4 (VH: QVTLRESGPALVKPTQTLTLTCTFSGFSLSTSGMSVGWIRQPPGKALEWLADIWWDD KKDYNPSLKSRLTISKDTSKNQVVLKVTNMDPADTATYYCARSMITNWYFDVWGA GTTVTVSS (SEQ ID NO: 1911); VL: DIQMTQSPSTLSASVGDRVTITCKCQLSVGYMHWYQQKPGKAPKLLIYDTSKLASG VPSRFSGSGSGTEFTLTISSLQPDDFATYYCFQGSGYPFTFGGGTKLEIK (SEQ ID NO: 1912)). In some embodiments, the 80% competition is determined as follows:
[0451] A) Ab like TB006 is diluted and coated onto an ELISA plate.
[0452] B) The plate is incubated and, after incubation, the plate is washed, a blocking solution is applied and the plate is incubated again
[0453] C) The blocking solution is removed.
[0454] D) Ab (potentially competing Ab) is mixed with Flag-tagged Gal-3 protein and are added to the Elisa plate.
[0455] E) The ELISA plate is incubated then washed.
[0456] F) The plate is then developed and read in a plate reader.
[0457] G) Data can be analyzed and/or graphed using any appropriate means.

[0458] In some embodiments, the 80% competition value can be determined as outlined in Example 54 herein. In some embodiments, the 80% competition value can be determined as follows: Gal3 Ab like TB006 diluted in PBS and coated in a 96-well ELISA plate. The plate is incubated overnight and then washed with three times, followed by a application of a blocking solution and incubation for an hour with gentle rocking. The existing blocking solution is then discarded from the plate. Any competing antibody is mixed with Flag-tagged Gal-3 protein and is then applied to the plate. The plate is incubated for an hour at RT with gentle rocking, then washed with PBST. Afterwards, HRP-tagged anti-FLAG Gal3 antibodies are diluted in PBST and added to the plate. The plate is incubated at RT with gentle rocking, then washed with PBST. If the anti-gal3 blocking antibody competes for binding with the anti-Gal3 antibody, then HRP-tagged anti-FLAG Gal3 will not be detectable following the wash. If the anti-gal3 blocking antibody does not compete for binding with the anti-Gal3 antibody, then HRP-tagged anti-FLAG Gal3 will be detectable, or will be detectable to a lesser level following the wash. To develop the plate, ABTS substrate is added to each well and incubated until a sufficiently high signal is achieved. The plate is read in a plate reader at an absorbance of 405 nm. Data is then analyzed and/or visualized using any appropriate means such as graphing the data using GraphPad Prism 8.0 software (GraphPad Software Inc).

[0459] A human or humanized antibody that competes for binding to GAL3 with TB006, wherein the antibody competes at a level of at least 80% competition. In some embodiments, the antibody is not one or any of: F847C.21H6 ((VH: QIQLVQSGPELKKPGETVKISCKASGYTFTIFGMNWVKQAPGKGLKWMGWVNTYT GEPTYADDFKGRFAFSLETSASTAYLQINNLKNEDTATYFCARGWFAYWGQGTLVT VSA (SEQ ID NO: 367); VL: DVVMTQTPLTLSVTIGQPASISCKSSRSLLDSDGKTYLNWLLQRPGQSPKRLIYLVSK LDSGVPDRFTGSGSGTDFTLKISRVEAEDLGVYYCWQGTHFPQTFGGGTKLEIN (SEQ ID NO:440)), F846TC.14A2 (VH: QIQLVQSGPELKKPGETVKISCKASGYTFTNYGMNWVKQAPGKGLKWMGWINTYT GEPTYAGDLKGRFAFSLETSASTAYLQINNLKNEDTATYFCVRYTMDYWGQGTSVT VSS (SEQ ID NO: 326); VL: QAVVTQESALTTSPGETVTLTCRSSTGAVTTSNYANWVQEKPDHLFTGLIGGINNRV PGVPARFSGSLIGDKAALTITGAQTEDEAIYFCALWYSNHWVFGGGTKLTVL (SEQ ID NO:403)), F847C.12F12 (VH: QIQLVQSGPELKKPGETVKISCKASGYTFTNYGMNWVKQAPGKGLKWMGWINTYT GEPTYVDDFKGRFAFSLETSASTAYLRINNLKNEDTATYFCAKFGNYVGAMDYWGQ GTSVTVSS (SEQ ID NO:343); VL: DIQVIQSPSSLSASLGDTITITCHASQNINVWLSWYQQKPGNIPKLLIYKASNLHTGVP SRFSGSGSGTGFTLTISSLQPEDIATYYCQQGQSYPYTFGGGTKLELK (SEQ ID NO:409)), F846T.16B5 (VH: QIQLVQSGPELKKPGETVKISCKASGYTFTNYGMNWVKQAPGKGLKWMGWINTYT GEPAYADDFKGRFAFSLETSASTAYLQINNLKNEDMATYFCARWGGYDGDYYAMD YWGQGTSVTVSS (SEQ ID NO:328); VL: NIMMTQSPSSLAVSAGEKVTMSCKSSQSVLYSSNQKNYLAWYQQKPGQSPKLLIYW ASTRESGVPDRFTGSGSGTDFTLTISSVQAEDLAVYYCHQYLSSLTFGAGTKLELK (SEQ ID NO:405)), F846C.2H3 (VH: QIQLVQSGPELKKPGETVKISCKASGYTFTNYGMNWVKQAPGKGLKWMGWINTYT GEPSYADDFKGRFAFSLETSASTAYLQINNLKNEDMATYFCARWGGYDGDYYAMD YWGQGTSVTVSS (SEQ ID NO:323); VL: NIMMTQSPSSLAVSAGEKVTMSCKSSQSVLYSSNQKNYLAWYQQKPGQSPKLLIYW ASTRESGVPDRFTGSGSGTDFTLTISSVQPEDLAVYYCHQYLSSLTFGAGTKLELK (SEQ ID NO:400)), F846C.1F5 (VH: QIQLVQSGPELKKPGETVKISCKASGYTFTNYGMNWVKQAPGKGLKWMGWINTYT GEPSYADDFKGRFAFSLETSASTAYLQINNLKNEDMATYFCARWGGYDGDYYAMD YWGQGTSVTVSS (SEQ ID NO:323); VL: NIMMTQSPSSLAVSAGEKVTMSCKSSQSVLYSSNQKNYLAWYQQKPGQSPKLLIYW ASTRESGVPDRFTGSGSGTDFTLTISSVQPEDLAVYYCHQYLSSLTFGAGTKLELK (SEQ ID NO: 400)), TB001 (VH: QVQLVQSGSELKKPGASVKVSCKASGYTFTNYGMNWVRQAPGQGLKWMGWINTN TGEPTYVEEFTGRFVFSLETSVSTAYLQISSLKAEDTAVYFCAPYDNFFAYWGQGTT VTVSS (SEQ ID NO: 297); VL: DIVLTQSPLSLPVTPGEPASISCRSSKSLLYKDGKTYLNWFLQKPGQSPQLLIYLMSTH ASGVPDRFSGSGSGTDFTLKISRVEAEDVGVYYCQQLVDYPLTFGGGTKLEIK (SEQ ID NO: 374)), or Synagis-hIgG4 (VH: QVTLRESGPALVKPTQTLTLTCTFSGFSLSTSGMSVGWIRQPPGKALEWLADIWWDD KKDYNPSLKSRLTISKDTSKNQVVLKVTNMDPADTATYYCARSMITNWYFDVWGA GTTVTVSS (SEQ ID NO: 1911); VL: DIQMTQSPSTLSASVGDRVTITCKCQLSVGYMHWYQQKPGKAPKLLIYDTSKLASG VPSRFSGSGSGTEFTLTISSLQPDDFATYYCFQGSGYPFTFGGGTKLEIK (SEQ ID NO: 1912)). In some embodiments, the 80% competition is determined as follows:
[0460] A) Gal3 Ab diluted in PBS and coated a 96-well ELISA plate.
[0461] B) The plate is incubated overnight and then washed with three times, followed by a application of a blocking solution and incubation for an hour with gentle rocking.
[0462] C) The existing blocking solution is then discarded from the ELISA plate.
[0463] D) Competing antibody is mixed with Flag-tagged Gal-3 in binding solutions and then applied to the ELISA plate.
[0464] E) The ELISA plate is incubated for an hour at RT with gentle rocking, then washed with PBST.
[0465] F) HRP-conjugated anti-FLAG Gal3 antibodies are diluted in PBST and added to the plate.

[0466] G) The plate is incubated at RT with gentle rocking, then washed with PBST.
[0467] H) To develop the plate, ABTS substrate is added to each well and incubated until a sufficiently high signal is achieved.

[0468] I) The plate is read in a plate reader at an absorbance of 405 nm. Data is then analyzed and/or visualized using any appropriate means such as graphing the data using GraphPad Prism 8.0 software (GraphPad Software Inc).

[0469] In some embodiments, the 80% competition value can be determined as outlined in Example 54 herein. In some embodiments, the 80% competition value can be determined as follows: Ab diluted 2-fold in PBS and coated a 96-well ELISA plate. After incubating the plate at 4° C. overnight, the plate is washed with PBST three times, followed by a blocking step with 2% BSA in PBST and incubation for an hour at room temperature (RT) with gentle rocking. The existing blocking solution is then discarded from the plate. Binding solutions are prepared by 2-fold dilutions from 4 μg/ml in a 2% buffer of BSA in PBST containing Flag-tagged Gal-3 protein. The dilution is then applied to the plate, then serially diluted two-fold in 2% BSA in PBST. The plate is incubated for an hour at RT with gentle rocking, then washed with PBST three times. Afterwards, HRP-conjugated anti-FLAG Gal3 antibodies are diluted to in 2% BSA in PBST and added to all the wells. The plate is incubated for 40 minutes at RT with gentle rocking, then washed with PBST three times. To develop the plate, ABTS substrate is added to each well and incubated until a sufficiently high signal is achieved. The plate is read in a plate reader at an absorbance of 405 nm. Data is then analyzed and/or visualized using any appropriate means such as graphing the data using GraphPad Prism 8.0 software (GraphPad Software Inc). If the anti-gal3 blocking antibody competes for binding with the anti-Gal3 antibody, then HRP-conjugated anti-FLAG Gal3 will not be detectable following the wash. If the anti-gal3 blocking antibody does not compete for binding with the anti-Gal3 antibody, then HRP-tagged anti-FLAG Gal3 will be detectable, or will be detectable to a lesser level following the wash.

[0470] A human or humanized antibody that competes for binding to GAL3 with TB006, wherein the antibody competes at a level of at least 80% competition. In some embodiments, the antibody is not one or any of: F847C.21H6 ((VH: QIQLVQSGPELKKPGETVKISCKASGYTFTIFGMNWVKQAPGKGLKWMGWVNTYT GEPTYADDFKGRFAFSLETSASTAYLQINNLKNEDTATYFCARGWFAYWGQGTLVT VSA (SEQ ID NO: 367); VL: DVVMTQTPLTLSVTIGQPASISCKSSRSLLDSDGKTYLNWLLQRPGQSPKRLIYLVSK LDSGVPDRFTGSGSGTDFTLKISRVEAEDLGVYYCWQGTHFPQTFGGGTKLEIN (SEQ ID NO:440)), F846TC.14A2 (VH: QIQLVQSGPELKKPGETVKISCKASGYTFTNYGMNWVKQAPGKGLKWMGWINTYT GEPTYAGDLKGRFAFSLETSASTAYLQINNLKNEDTATYFCVRYTMDYWGQGTSVT VSS (SEQ ID NO: 326); VL: QAVVTQESALTTSPGETVTLTCRSSTGAVTTSNYANWVQEKPDHLFTGLIGGINNRV PGVPARFSGSLIGDKAALTITGAQTEDEAIYFCALWYSNHWVFGGGTKLTVL (SEQ ID NO:403)), F847C.12F12 (VH: QIQLVQSGPELKKPGETVKISCKASGYTFTNYGMNWVKQAPGKGLKWMGWINTYT GEPTYVDDFKGRFAFSLETSASTAYLRINNLKNEDTATYFCAKFGNYVGAMDYWGQ GTSVTVSS (SEQ ID NO:343); VL: DIQVIQSPSSLSASLGDTITITCHASQNINVWLSWYQQKPGNIPKLLIYKASNLHTGVP SRFSGSGSGTGFTLTISSLQPEDIATYYCQQGQSYPYTFGGGTKLELK (SEQ ID NO:409)), F846T.16B5 (VH: QIQLVQSGPELKKPGETVKISCKASGYTFTNYGMNWVKQAPGKGLKWMGWINTYT GEPAYADDFKGRFAFSLETSASTAYLQINNLKNEDMATYFCARWGGYDGDYYAMD YWGQGTSVTVSS (SEQ ID NO:328); VL: NIMMTQSPSSLAVSAGEKVTMSCKSSQSVLYSSNQKNYLAWYQQKPGQSPKLLIYW ASTRESGVPDRFTGSGSGTDFTLTISSVQAEDLAVYYCHQYLSSLTFGAGTKLELK (SEQ ID NO:405)), F846C.2H3 (VH: QIQLVQSGPELKKPGETVKISCKASGYTFTNYGMNWVKQAPGKGLKWMGWINTYT GEPSYADDFKGRFAFSLETSASTAYLQINNLKNEDMATYFCARWGGYDGDYYAMD YWGQGTSVTVSS (SEQ ID NO:323); VL: NIMMTQSPSSLAVSAGEKVTMSCKSSQSVLYSSNQKNYLAWYQQKPGQSPKLLIYW ASTRESGVPDRFTGSGSGTDFTLTISSVQPEDLAVYYCHQYLSSLTFGAGTKLELK (SEQ ID NO:400)), F846C.1F5 (VH: QIQLVQSGPELKKPGETVKISCKASGYTFTNYGMNWVKQAPGKGLKWMGWINTYT GEPSYADDFKGRFAFSLETSASTAYLQINNLKNEDMATYFCARWGGYDGDYYAMD YWGQGTSVTVSS (SEQ ID NO:323); VL: NIMMTQSPSSLAVSAGEKVTMSCKSSQSVLYSSNQKNYLAWYQQKPGQSPKLLIYW ASTRESGVPDRFTGSGSGTDFTLTISSVQPEDLAVYYCHQYLSSLTFGAGTKLELK (SEQ ID NO: 400)), TB001 (VH: QVQLVQSGSELKKPGASVKVSCKASGYTFTNYGMNWVRQAPGQGLKWMGWINTN TGEPTYVEEFTGRFVFSLETSVSTAYLQISSLKAEDTAVYFCAPYDNFFAYWGQGTT VTVSS (SEQ ID NO: 297); VL: DIVLTQSPLSLPVTPGEPASISCRSSKSLLYKDGKTYLNWFLQKPGQSPQLLIYLMSTH ASGVPDRFSGSGSGTDFTLKISRVEAEDVGVYYCQQLVDYPLTFGGGTKLEIK (SEQ ID NO: 374)), or Synagis-hIgG4 (VH: QVTLRESGPALVKPTQTLTLTCTFSGFSLSTSGMSVGWIRQPPGKALEWLADIWWDD KKDYNPSLKSRLTISKDTSKNQVVLKVTNMDPADTATYYCARSMITNWYFDVWGA GTTVTVSS (SEQ ID NO: 1911); VL: DIQMTQSPSTLSASVGDRVTITCKCQLSVGYMHWYQQKPGKAPKLLIYDTSKLASG VPSRFSGSGSGTEFTLTISSLQPDDFATYYCFQGSGYPFTFGGGTKLEIK (SEQ ID NO: 1912)). In some embodiments, the 80% competition is determined as follows:
[0471] A) Ab diluted 2-fold in PBS and coated a 96-well ELISA plate.
[0472] B) After incubating the plate at 4° C. overnight, the plate is washed with PBST three times, followed by a blocking step with 2% BSA in PBST and incubation for an hour at room temperature (RT) with gentle rocking.
[0473] C) The existing blocking solution is then discarded from the plate.
[0474] D) Binding solutions are prepared by 2-fold dilutions from 4 μg/ml competing antibody in a 2% buffer of BSA in PBST containing Flag-tagged Gal-3 protein.
[0475] E) The dilution is then applied to the plate, then serially diluted two-fold in 2% BSA in PBST.
[0476] F) The plate is incubated for an hour at RT with gentle rocking, then washed with PBST three times.
[0477] G) Afterwards, HRP-conjugated anti-FLAG Gal3 antibodies are diluted to in 2% BSA in PBST and added to all the wells.
[0478] H) The plate is incubated for 40 minutes at RT with gentle rocking, then washed with PBST three times.
[0479] I) The ELISA plate is developed by adding ABTS substrate to each well and incubated until a sufficiently high signal is achieved.
[0480] J) The plate is read in a plate reader at an absorbance of 405 nm.
[0481] K) Data is then analyzed and/or visualized using any appropriate means such as graphing the data using GraphPad Prism 8.0 software (GraphPad Software Inc).
   In some embodiments, instead of the 80% competition measurement, an alternative measurement or amount of competition can be used, so long as it is equivalent to 80% (or the desired percent competition) as determined by any of the ELISA style competition assays provided herein. Thus, in some embodiment, any antibody that shows competition for binding to TB006 to GAL-3, as a level that is equivalent to any of the ELSIA competition assays provided herein can be used for any of the methods and/or compositions provided herein.

[0482] In some embodiments, the 80% competition value can be determined as outlined in Example 54 herein. In some embodiments, the 80% competition value can be determined as follows: Ab diluted 2-fold in PBS from a concentration of 4 μg/ml and coated a 96-well ELISA plate by adding 80 μl per well. After incubating the plate at 4° C. overnight, the plate is washed with 300 μl PBST three times, followed by a blocking step with 150 μl of 2% BSA in PBST per well and incubated for an hour at room temperature (RT) with gentle rocking. The existing blocking solution is then discarded from the plate. Binding solutions are prepared by 2-fold dilutions from 4 μg/ml competing antibody in a 2% buffer of BSA in PBST containing Flag-tagged Gal-3 to a concentration of 4 μg/ml. The dilution is then applied to the plate by adding 60 μl per well column-wise for each galectin-3, then serially diluted two-fold length-wise in 2% BSA in PBST. The plate is incubated for an hour at RT with gentle rocking, then washed with 300 μl PBST three times. Afterwards, HRP-conjugated anti-FLAG antibodies are diluted to 1:2000 in 2% BSA in PBST, and 25 μl is added to all the wells. The plate is incubated for 40 minutes at RT with gentle rocking, then washed with 300 μl PBST three times. To develop the plate, 50 μl of ABTS substrate is added to each well and incubated until a sufficiently high signal was achieved. The plate is read in a plate reader at an absorbance of 405 nm. Data can be graphed using GraphPad Prism 8.0 software (GraphPad Software Inc).

[0483] As noted herein, antibodies that compete for binding with TB006 at a level of at least 80% (as, for example, determined in the method of Example 54) can be used in any of the embodiments provided herein (in some embodiments). In further support that this genus of antibodies (as shown in the results of Example 54) is herein provided, it is noted that Examples 53-56 provide structural information regarding the relevant epitopes and competition aspects of numerous antibodies provided herein. Relevant epitope information has been provided by HDX (in Example 53), competition data in Example 54, and crystal structure and other functional information in Examples 55 and 56. Thus, in some embodiments, any antibodies that compete for binding to Gal3 with TB006, can be used in the methods provided herein.

[0484] As noted herein, antibodies that compete for binding with TB006 at a level of at least 50%, 60%, 70%, 80%, 90%, or 100% can be used in any of the embodiments provided herein (in some embodiments), or that competes for binding with TB006 at a level that is in a range that is defined by any two of the preceding values. For example, in some embodiments, the antibodies compete for binding with TB006 at a level between about 50%-100%, 50%-80%, 50%-70%, 60%-100%, 60%-90%, 60%-70%, 70%-100%, or 70%-90%.

[0485] In some embodiments, the human or humanized antibody comprises an antibody in Table 1.

TABLE 1

| | | SEQ | | SEQ |
|---|---|---|---|---|
| Ab | VH | ID NO | VL | ID NO |
| 13H12- | QVQLVQSGSELKKPGASVKVSCKA | 1882 | DVVMTQSPLSLPVTLGQPA | 1899 |
| VH3- | SGYTFTEYTIHWVRQAPGQGLEWM | | SISCRSSQSLFHSDGKTYL | |
| hIgG4 | GWFYPGSDNINYNEGFTGRFVLSA | | NWLQQRPGQSPRRLIYLVS | |
| (S228P)- | DKSVSTAYLQICSLKAEDTAVYFC | | KRDSGVPDRFSGSGSGTDF | |
| VL1 | ARHEEGVITTVSYFDYWGQGTLVT | | TLKISRVEAEDVGVYYCWQ | |
| | VSS | | GTHFPLTFGGGTKVEIK | |
| 4A11- | QVQLVQSGAEVKKPGASVKVSCKA | 1883 | DIVMTQTPLSLSVTPGQPA | 1900 |
| VH3- | SGYSFTNYYMHWVRQAPGQRLEWM | | SISCKSSKSLLHSDGITYL | |
| hIgG4 | GWIYPGSGNTNYNEKFQGRVTITA | | YWYLQKPGQSPQLLIYRMS | |
| (S228P)- | DTSASTAYMELSSLRSEDTAVYYC | | NLASGVPDRFSGSGSGTDF | |
| VL1 | STAPGGFDVWGQGTTVTVSS | | TLKISRVEAEDVGVYYCAQ | |
| (TB006) | | | MLEFPLTFGQGTKLEIK | |
| 19B5- | QVQLVQSGSELKKPGASVKVSCKA | 1884 | DIQMTQSPSSLSASVGDRV | 1901 |
| H1L1- | SGYTFTTYAMSWVRQAPGQGLEWM | | TITCRASQGINNYLNWYQQ | |
| hIgG4 | GWINTYSGVPTYADDFTGRFVFSL | | KPGKVPKLLIYYASTLHSG | |
| (S228P) | ETSVSTAYLQISSLKAEDTAVYFC | | VPSRFSGSGSGTDYTLTIS | |
| | ARGPYAMDYWGQGTLVTVSS | | SLQPEDVATYYCQQYSQVP | |
| | | | YTFGQGTKLEIK | |
| 14H10.2C9- | QIQLVQSGPELKKPGETVKISCKA | 1885 | DVVMTQTPLTLSVTIGQPA | 1902 |
| hIgG4 | SGYTFTTYGMGWVKQAPGKDLKWM | | SISCKSSQSLFDSDGKTYL | |
| (S228P) | GWINTYSGVPTYADDFKGRFAFSL | | NWLLQRPGQSPKRLIYLVS | |
| | ETSASTAYLQISNLKNEDTATYFC | | KLDSGVPDRFTGSGSGTDF | |
| | STPYEYDGAYWGQGTLVTVSA | | TLKISRVEAEDLGVYYCWQ | |
| | | | GTHFPLTFGAGTKLEMK | |
| 15G7.2A7- | EVQLQQSGPELVKPGASVKISCKA | 1886 | DIQMNQSPSSLSASLGDTI | 1903 |
| hIgG4 | SGYTFTDYYMNWVKQSHGKSLEWI | | SITCRASQNINIWLSWYQQ | |
| (S228P) | GDINPNNGGTNYNQKFKGKATLTV | | KPGNIPQLLIYKASNLHTG | |
| | DKSSSTAYMELRSLTSEDSAVYYC | | VPSRFSGSGSGTDFTLTIS | |
| | TSGYGFPYWGQGTLVTVSA | | SLQPEDIATYYCLQGQSYP | |
| | | | LTFGAGTKLVMK | |
| MOPC21- | DVQLVESGGGLVQPGGSRKLSCAA | 1887 | NIVMTQSPKSMSMSVGERV | 1904 |
| hIgG4 | SGFTFSSFGMHWVRQAPEKGLEWV | | TLTCKASENVVTYVSWYQQ | |
| (S228P) | AYISSGSSTLHYADTVKGRFTISR | | KPEQSPKLLIYGASNRYTG | |
| | DNPKNTLFLQMTSLRSEDTGMYYC | | VPDRFTGSGSATDFTLTIS | |
| | ARWGNYPYYAMDYWGQGTSVTVSS | | SVQAEDLADYHCGQGYSYP | |
| | | | YTFGGGTKLEIK | |
| 846.1H12- | QIQLVQSGPELKKPGETVKISCKA | 1888 | METDTLLLWVLLLWVPGST | 1905 |
| hIgG4 | SGYTFTNFGMNWVKQAPGKGLKWM | | GNIMMTQSPSSLAVSAGQK | |
| (S228P) | GWINTYTGEPSYADDFKGRFAFSL | | VTMSCKSSQSVLYSSSQKN | |
| | ETSASTAYLQINNLKNEDIATYFC | | YLAWYQQKPGQSPKLLIYW | |
| | ARWGGYAGDYYAMDYWGQGTSVTV | | ASTRESGVPDRFSGSGSGT | |
| | SS | | DFTLTISSVQPEDLAVYYC | |
| | | | HQYLSSLTFGAGTKLELK | |
| 846.2H3- | QIQLVQSGPELKKPGETVKISCKA | 1889 | NIMMTQSPSSLAVSAGQKV | 1906 |
| hIgG4 | SGYTFTNYGMNWVKQAPGKGLKWM | | TMSCKSSQSVLYSSSQKNY | |
| (S228P) | GWINTYTGEPSYADDEKGRFAFSL | | LAWYQQKPGQSPKLLIYWA | |
| Sister | ETSASTAYLQINNLKNEDMATYFC | | STRESGVPDRFSGSGSGTD | |
| clone- | ARWGGYDGDYYAMDYWGQGTSVTV | | FTLTISSVQPEDLAVYYCH | |
| IMTAB0201 | SS | | QYLSSLTFGAGTKLELK | |
| 846.1F5-4 | QIQLVQSGPELKKPGETVKISCKA | 1890 | NIMMTQSPSSLAVSAGEKV | 1907 |
| hIgG | SGYTFTNYGMNWVKQAPGKGLKWM | | TMSCKSSQSVLYSSNQKNY | |
| (S228P) | GWINTYTGEPSYADDFKGRFAFSL | | LAWYQQKPGQSPKLLIYWA | |
| Sister | ETSASTAYLQINNLKNEDMATYFC | | STRESGVPDRFTGSGSGTD | |
| clone- | ARWGGYDGDYYAMDYWGQGTSVTV | | FTLTISSVQPEDLAVYYCH | |
| IMTAB0199 | SS | | QYLSSLTFGAGTKLELK | |
| 846T.16B5- | QIQLVQSGPELKKPGETVKISCKA | 1891 | NIMMTQSPSSLAVSAGEKV | 1908 |
| hIgG4 | SGYTFTNYGMNWVKQAPGKGLKWM | | TMSCKSSQSVLYSSNQKNY | |
| (S228P) | GWINTYTGEPAYADDEKGRFAFSL | | LAWYQQKPGQSPKLLIYWA | |
| | ETSASTAYLQINNLKNEDMATYFC | | STRESGVPDRFTGSGSGTD | |
| | ARWGGYDGDYYAMDYWGQGTSVTV | | FTLTISSVQAEDLAVYYCH | |
| | SS | | QYLSSLTFGAGTKLELK | |
| 20D11.2C6- | EVQLQQSGPELVKPGASVKISCKA | 1892 | DIQMNQSPSSLSASLGDTI | 1909 |
| hIgG4 | SGYTFTDFYINWVKQSHGKSLEWI | | TITCRASQNIYIWLSWYQQ | |
| (S228P) | GDINPKNGGINYNPKFKIKATLTV | | KPGNIPKLLIYKASNLHTG | |
| | DKSSSTSYMDLRGLTSEDSAVYYC | | VPSRFSGSGSGTDFTLTIS | |
| | TSGYGFPYWGQGTLVTVSA | | TLQPEDIATYFCLQGQSYP | |
| | | | LTFGAGTKLEMK | |
| IMT001- | QVQLVQSGSELKKPGASVKVSCKA | 1893 | DIVLTQSPLSLPVTPGEPA | 1910 |
| 4-HCLC | SGYTFTNYGMNWVRQAPGQGLKWM | | SISCRSSKSLLYKDGKTYL | |
| (TB001) | GWINTNTGEPTYVEEFTGRFVFSL | | NWFLQKPGQSPQLLIYLMS | |
| | ETSVSTAYLQISSLKAEDTAVYFC | | THASGVPDRFSGSGSGTDF | |
| | APYDNFFAYWGQGTTVTVSS | | TLKISRVEAEDVGVYYCQQ | |
| | | | LVDYPLTFGGGTKLEIK | |
| 847.12F12- | QIQLVQSGPELKKPGETVKISCKA | 1894 | DIQVIQSPSSLSASLGDTI | 1911 |
| hIgG4 | SGYTFTNYGMNWVKQAPGKGLKWM | | TITCHASQNINVWLSWYQQ | |
| (S228P) | GWINTYTGEPTYVDDFKGRFAFSL | | KPGNIPKLLIYKASNLHTG | |
| | ETSASTAYLRINNLKNEDTATYFC | | VPSRFSGSGSGTGFTLTIS | |
| | AKFGNYVGAMDYWGQGTSVTVSS | | SLQPEDIATYYCQQGQSYP | |
| | | | YTFGGGTKLELK | |
| 846T.14A2- | QIQLVQSGPELKKPGETVKISCKA | 1895 | QAVVTQESALTTSPGETVT | 1912 |
| hIgG4 | SGYTFTNYGMNWVKQAPGKGLKWM | | LTCRSSTGAVTTSNYANWV | |
| (S338P) | GWINTYTGEPTYAGDLKGRFAFSL | | QEKPDHLFTGLIGGINNRV | |
| | ETSASTAYLQINNLKNEDTATYFC | | PGVPARFSGSLIGDKAALT | |
| | VRYTMDYWGQGTSVTVSS | | ITGAQTEDEAIYFCALWYS | |
| | | | NHWVFGGGTKLTVL | |
| 798- | QIQLVQSGPELKKPGESVKISCKA | 1896 | DIQMTQTTSSLSASLGDRV | 1913 |
| 9.20H5.A3- | SGYAFTTYGMSWVQQAPGKGLKWM | | TINCSASQDISNYLNWYQQ | |
| mH1mL0- | GWVNTYSGVPTYADDFKGRFAFSL | | KPDGTVKLLIYYTSSLLSG | |
| hIgG4 | ETSASTAYLQINNLRNEDTATYFC | | VPSRFSGSGSGTDYSLTIS | |
| (S228P) | ARGPYAMDYWGQGTSVTVSS | | NLEPEDIATYFCQQYSKLP | |
| | | | YTFGSGTHLEIK | |
| F847C.21H6- | QIQLVQSGPELKKPGESVKISCKA | 1897 | DVVMTQTPLTLSVTIGQPA | 1914 |
| hIgG4 | SGYAFTTYGMSWVQQAPGKGLKWM | | SISCKSSRSLLDSDGKTYL | |
| (S228P) | GWVNTYSGVPTYADDFKGRFAFSL | | NWLLQRPGQSPKRLIYLVS | |
| | ETSASTAYLQINNLRNEDTATYFC | | KLDSGVPDRFTGSGSGTDF | |
| | ARGPYAMDYWGQGTSVTVSS | | TLKISRVEAEDLGVYYCWQ | |
| | | | GTHFPQTFGGGTKLEIN | |
| 798- | QIQLVQSGPELKKPGETVKISCKA | 1898 | DALMTQTPLTLSVTIGQPA | 1915 |
| 9.19D9.2E5- | SGYTFTTYGMGWVKQAPGKGLKWM | | SISCKSSQSLLHSDGKTYL | |
| hIqG4 | GWINTYSGVPTYADDFKGRFAFSL | | NWLLQRPGQPPKRLMYLVS | |
| (S228P)- | ETSTSTAYLQINNLKNEDMATYFC | | TLDSGVPDRFTGSGSGTDF | |
| mV2 | ATPYEYDGAYWGQGTLVTVSA | | TLKISRVEAEDLGVYYCWQ | |
| | | | GTHFPLTFGAGTKLELK | |

[0486] FIG. 57 is a flow chart depicting some embodiments of methods for inhibiting Gal3-mediated aggregation of a protein.

[0487] In some embodiments, a method of inhibiting Gal3-mediated oligomerization of a protein is disclosed. In some embodiments, the method comprises: contacting the protein with an anti-Gal3 antibody or binding fragment thereof, wherein binding of the anti-Gal3 antibody or binding fragment thereof to Gal3 inhibits Gal3-mediated oligomerization of the protein.

[0488] In some embodiments, a method of inhibiting Gal3-mediated amyloid aggregation of a protein is disclosed. In some embodiments, the method comprises: contacting the protein with an anti-Gal3 antibody or binding fragment thereof, wherein binding of the anti-Gal3 antibody or binding fragment thereof to Gal3 inhibits Gal3-mediated oligomerization of the protein.

[0489] In some embodiments are disclosed methods of inhibiting Gal3-mediated aggregation or oligomerization of a protein 5700. In some embodiments, the methods comprise contacting the protein with an anti-Gal3 blocking antibody or binding fragment thereof 5701. In some embodiments, the anti-Gal3 blocking antibody blocks binding of one or more anti-Gal3 antibodies 5702 from binding to Gal3. In some embodiments, binding of the anti-Gal3 blocking antibody 5703 or binding fragment thereof to Gal3 inhibits Gal3-mediated aggregation or oligomerization of the protein 5704. In some embodiments, the protein is in a cell. In some embodiments, the protein comprises α-synuclein, tau protein, phospho tau, TAR DNA binding protein (TDP-43), transthyretin, uromodulin, islet amyloid polypeptide (IAPP), serum amyloid A (SAA), p53, apolipoprotein E (APOE), APOE-4, prion protein, fibrin, neurofilament light (NFL), CRP, SUMO, light chain, platelet-derived growth factor receptor (PDGFR), melanoma cell adhesion molecule (MCAM), complement protein C3, complement protein C9, lysozyme, insulin, native haemoglobin (Hb), glycosylated haemoglobin (HbAIC), phenylalanine (Phe), glutamine (Gln), cholesteryl (co-esteryl), cholesterol, neuroserpin, crystallin AA, crystallin AB, cystatin-C, myostatin pro-peptide, Atrial Natriuretic Peptide (ANP), B-Type Natriuretic Peptide (BNP), or any combination therein.

[0490] Also disclosed herein are methods of inhibiting Gal3-mediated aggregation or oligomerization of a protein in a cell. In some embodiments, the methods comprise contacting the cell with an anti-Gal3 blocking antibody or binding fragment thereof. In some embodiments, binding of the anti-Gal3 blocking antibody or binding fragment thereof to Gal3 in the cell inhibits Gal3-mediated aggregation or oligomerization of the protein.

[0491] In some embodiments, the method is performed in vitro or in vivo.

[0492] In some embodiments, Gal3-mediated aggregation or oligomerization of the protein is inhibited by at least 5%, 10%, 15%, 20%, 25%, 30%, 35%, 40%, 45%, 50%, 55%, 60%, 65%, 70%, 75%, 80%, 85%, 90%, 95%, or 99%, or any percentage within a range defined by any two of the aforementioned percentages, after contacting with the anti-Gal3 blocking antibody or binding fragment thereof relative to a cell that is not contacted with the anti-Gal3 antibody blocking or binding fragment thereof.

[0493] In some embodiments, the protein comprises α-synuclein, tau protein, phospho tau, TAR DNA binding protein (TDP-43), transthyretin, uromodulin, islet amyloid polypeptide (IAPP), serum amyloid A (SAA), p53, apolipoprotein E (APOE), APOE-4, prion protein, fibrin, neurofilament light (NFL), CRP, SUMO, light chain, platelet-derived growth factor receptor (PDGFR), melanoma cell adhesion molecule (MCAM), complement protein C3, complement protein C9, lysozyme, insulin, native haemoglobin (Hb), glycosylated haemoglobin (HbAIC), phenylalanine (Phe), glutamine (Gln), cholesteryl (co-esteryl), cholesterol, neuroserpin, crystallin AA, crystallin AB, cystatin-C, myostatin pro-peptide, Atrial Natriuretic Peptide (ANP), B-Type Natriuretic Peptide (BNP), or any combination therein. In some embodiments, the phosphorylated tau forms trimers, tetramers, or higher order oligomers when contacted with Gal3.

[0494] In some embodiments, the anti-Gal3 blocking antibody or binding fragment competes for binding to Gal3 with an anti-Gal3 antibody or binding fragment thereof comprising (1) a heavy chain variable region comprising a VH-CDR1, a VH-CDR2, and a VH-CDR3; and (2) a light chain variable region comprising a VL-CDR1, a VL-CDR2, and a VL-CDR3. In some embodiments, the anti-Gal3 blocking antibody or binding fragment competes for binding to Gal3 with an anti-Gal3 antibody or binding fragment thereof, wherein the VH-CDR1 comprises an amino acid sequence having at least 80%, 81%, 82%, 83%, 84%, 85%, 86%, 87%, 88%, 89%, 90%, 91%, 92%, 93%, 94%, 95%, 96%, 97%, 98%, 99%, or 100% identity to any one of the amino acid sequences of SEQ ID NOs: 27-70. In some embodiments, the anti-Gal3 blocking antibody or binding fragment competes for binding to Gal3 with an anti-Gal3 antibody or binding fragment thereof, wherein the V_{H}-CDR2 comprises an amino acid sequence having at least 80%, 81%, 82%, 83%, 84%, 85%, 86%, 87%, 88%, 89%, 90%, 91%, 92%, 93%, 94%, 95%, 96%, 97%, 98%, 99%, or 100% identity to any one of the amino acid sequences of SEQ ID NOs: 71-111, 801, 951, 952. In some embodiments, the anti-Gal3 blocking antibody or binding fragment competes for binding to Gal3 with an anti-Gal3 antibody or binding fragment thereof, wherein the VH-CDR3 comprises an amino acid sequence having at least 80%, 81%, 82%, 83%, 84%, 85%, 86%, 87%, 88%, 89%, 90%, 91%, 92%, 93%, 94%, 95%, 96%, 97%, 98%, 99%, or 100% identity to any one of the amino acid sequences of SEQ ID NOs: 112-169, 802, 953, 954. In some embodiments, the anti-Gal3 blocking antibody or binding fragment competes for binding to Gal3 with an anti-Gal3 antibody or binding fragment thereof, wherein the VL-CDR1 comprises an amino acid sequence having at least 80%, 81%, 82%, 83%, 84%, 85%, 86%, 87%, 88%, 89%, 90%, 91%, 92%, 93%, 94%, 95%, 96%, 97%, 98%, 99%, or 100% identity to any one of the amino acid sequences of SEQ ID NOs: 170-220. In some embodiments, the anti-Gal3 blocking antibody or binding fragment competes for binding to Gal3 with an anti-Gal3 antibody or binding fragment thereof, wherein the VL-CDR2 comprises an amino acid sequence having at least 80%, 81%, 82%, 83%, 84%, 85%, 86%, 87%, 88%, 89%, 90%, 91%, 92%, 93%, 94%, 95%, 96%, 97%, 98%, 99%, or 100% identity to any one of the amino acid sequences of SEQ ID NOs: 211-247. In some embodiments, the anti-Gal3 blocking antibody or binding fragment competes for binding to Gal3 with an anti-Gal3 antibody or binding fragment thereof, wherein the VL-CDR3 comprises an amino acid sequence having at least 80%, 81%, 82%, 83%, 84%, 85%, 86%, 87%, 88%, 89%, 90%, 91%, 92%, 93%, 94%, 95%, 96%, 97%, 98%, 99%, or 100% identity to any one of the amino acid sequences of SEQ ID NOs: 248-296. In some embodiments, the anti-Gal3 blocking antibody or binding fragment competes for binding to Gal3 with an anti-Gal3 antibody or binding fragment thereof, wherein the anti-Gal3 antibody or binding fragment thereof comprises a combination of the VH-CDR1, VH-CDR2, VH-CDR3, VL-CDR1, VL-CDR2, and VL-CDR3 as illustrated in FIG. 13. In some embodiments, the anti-Gal3 blocking antibody or binding fragment competes for binding to Gal3 with an anti-Gal3 antibody or binding fragment thereof, wherein the heavy chain variable region comprises a sequence having at least 80%, 81%, 82%, 83%, 84%, 85%, 86%, 87%, 88%, 89%, 90%, 91%, 92%, 93%, 94%, 95%, 96%, 97%, 98%, or 99% identity to the sequence selected from SEQ ID NOs: 374-447, 821-835, 941-943, 969-982, 1110-1152, 1440-1464. In some embodiments, the anti-Gal3 blocking antibody or binding fragment competes for binding to Gal3 with an anti-Gal3 antibody or binding fragment thereof, wherein the light chain variable region comprises a sequence having at least 80%, 81%, 82%, 83%, 84%, 85%, 86%, 87%, 88%, 89%, 90%, 91%, 92%, 93%, 94%, 95%, 96%, 97%, 98%, or 99% identity to the sequence selected from SEQ ID NOs: 374-447, 821-835, 941-943, 969-982, 1110-1152, 1440-1464. In some embodiments, the anti-Gal3 blocking antibody or binding fragment competes for binding to Gal3 with an anti-Gal3 antibody or binding fragment thereof, wherein the heavy chain comprises a sequence having at least 80%, 81%, 82%, 83%, 84%, 85%, 86%, 87%, 88%, 89%, 90%, 91%, 92%, 93%, 94%, 95%, 96%, 97%, 98%, or 99% identity to the sequence selected from SEQ ID NOs: 448-494, 804, 836-850, 983-996, 1153-1195, 1411, 1465-1489. In some embodiments, the anti-Gal3 blocking antibody or binding fragment competes for binding to Gal3 with an anti-Gal3 antibody or binding fragment thereof, wherein the light chain comprises a sequence having at least 80%, 81%, 82%, 83%, 84%, 85%, 86%, 87%, 88%, 89%, 90%, 91%, 92%, 93%, 94%, 95%, 96%, 97%, 98%, or 99% identity to the sequence selected from SEQ ID NOs: 495-538, 805, 851-865, 997-1010, 1196-1238, 1412, 1490-1514. In some embodiments, any antibody (human, humanized, or not) that competes for binding to any one or more of the proceeding antibodies (optionally at, at least 80% competition as defined in the present examples), can be used in the method as well. In some embodiments, the antibody binds to the same or overlapping epitope of any one or more of the preceding antibodies.

[0495] In some embodiments, the anti-Gal3 blocking antibody or binding fragment competes for binding to Gal3 with an anti-Gal3 antibody or binding fragment thereof, wherein the anti-Gal3 antibody or binding fragment thereof is selected from the group consisting of at least one of: TB001, TB006, 12G5.D7, 13A12.2E5, 14H10.2C9, 15F10.2D6, 19B5.2E6, 20D11.2C6, 20H5.A3, 23H9.2E4, 2D10.2B2, 3B11.2G2, 7D8.2D8, mIMT001, 4A11.2B5, 4A11.H1L1, 4A11.H4L2, 4G2.2G6, 6B3.2D3, 6H6.2D6, 9H2.2H10, 13G4.2F8, 13H12.2F8, 15G7.2A7, 19D9.2E5, 23B10.2B12, 24D12.2H9, F846C.1B2, F846C.1F5, F846C.1H12, F846C.1H5, F846C.2H3, F846TC.14A2, F846TC.14E4, F846TC.16B5, F846TC.7F10, F847C.10B9, F847C.11B1, F847C.12F12, F847C.26F5, F847C.4B10, F849C.8D10, F849C.8H3, 846.2B11, 846.4D5, 846T.1H2, 847.14H4, 846.2D4, 846.2F11, 846T.10B1, 846T.2E3, 846T.4C9, 846T.4E11, 846T.4F5, 846T.8D1, 847.10C9, 847.11D6, 847.15D12, 847.15F9, 847.15H11, 847.20H7, 847.21B11, 847.27B9, 847.28D1, 847.2B8, 847.3B3, 849.1D2, 849.2D7, 849.2F12, 849.4B2, 849.4F12, 849.4F2, 849.5C2, 849.8D12, F847C.21H6, 849.5H1, 847.23F11, 847.16D10, 847.13E2-mH0mL1, 847.13E2-mH0mL2, 847.12C4, 847.4D3, 2D10-VH0-VL0, 2D10-hVH4-HVL1, 2D10-hVH4-HVL2, 2D10-hVH4-HVL3, 2D10-hVH4-HVL4, 2D10-hVH3-HVL1, 2D10-hVH3-HVL2, 2D10-hVH3-HVL3, 2D10-hVH3-HVL4, 20H5.A3-VH3VL1, 20H5.A3-VH3VL3, 20H5.A3-VH4VL1, 20H5.A3-VH5VL1, 20H5.A3-VH5VL3, 20H5.A3-VH6VL1, 20H5.A3-VH6VL3, or a binding fragment thereof. In some embodiments, the anti-Gal3 blocking antibody or binding fragment competes for binding to Gal3 with an anti-Gal3 antibody or binding fragment thereof, wherein the anti-Gal3 antibody or binding fragment thereof is selected from the group consisting of at least one of: 2D10-VH0-VL0, 2D10-hVH4-HVL1, 2D10-hVH4-HVL2, 2D10-hVH4-HVL3, 2D10-hVH4-HVL4, 2D10-hVH3-HVL1, 2D10-hVH3-HVL2, 2D10-hVH3-HVL3, 2D10-hVH3-HVL4, or binding fragment thereof. In some embodiments, the anti-Gal3 blocking antibody or binding fragment competes for binding to Gal3 with an anti-Gal3 antibody or binding fragment thereof, wherein the anti-Gal3 antibody or binding fragment thereof is selected from the group consisting of at least one of: 21H6-H0L0, 21H6-H1L1, 21H6-H1L2, 21H6-H1L3, 21H6-H1L4, 21H6-H2L1, 21H6-H2L2, 21H6-H2L3, 21H6-H2L4, 21H6-H3L1, 21H6-H3L2, 21H6-H3L3, 21H6-H3L4, 21H6-H4L1, 21H6-H4L2, 21H6-H4L3, 21H6-H4L4, 21H6-H5L1, 21H6-H5L2, 21H6-H5L3, 21H6-H5L4, 21H6-H6L1, 21H6-H6L2, 21H6-H6L3, 21H6-H6L4, or a binding fragment thereof. In some embodiments, any antibody (human, humanized, or not) that competes for binding to any one or more of the proceeding antibodies (optionally at, at least 80% competition as defined in the present examples), can be used in the method as well. In some embodiments, the antibody binds to the same or overlapping epitope of any one or more of the preceding antibodies.

[0496] FIG. 58 is a flow chart depicting embodiments of a method of treating amyloid proteopathy in a subject.

[0497] In some embodiments are disclosed methods of treating an amyloid proteopathy in a subject in need thereof 5800. In some embodiments, the method comprises administering to the subject an anti-Gal3 blocking antibody 5801 or binding fragment thereof, wherein the anti-Gal3 blocking antibody or binding fragment thereof is a blocking antibody that blocks an anti-Gal3 antibody 5802 from binding to Gal3; wherein binding of the anti-Gal3 blocking antibody, or binding fragment thereof, binding to Gal3 5803 in the subject inhibits Gal3-mediated amyloid aggregation 5804 of a protein in the subject, thereby treating the amyloid proteopathy 5805 in the subject. In some embodiments, the amyloid proteopathy 5806 comprises familial Creutzfeldt-Jakob disease (CJD), Alzheimer's disease, CAA, tauopathies, Lewy body disease, multiple system atrophy, atherosclerosis, cardiovascular disease, familial encephalopathy with neuroserpin inclusion bodies (FENIB), insulin-derived amyloidosis, diabetes, type 2 diabetes, diabetes mellitus, kidney disease, prion disease, transmissible spongiform encephalopathy (TSE), human systemic amyloid disease, fatal familial insomnia, Gerstmann-Straussler-Scheinker disease, idiopathic inflammatory myopathies (IIM), transthyretin amyloidosis, heart disease, pre-eclampsia, phenylketonuria, Huntington disease, motor neuron degeneration, cerebrovascular damage, stroke disruption in innate immune system, damage to lenses, blurring of vision, congestive heart failure (CHF), cardiac amyloidosis, medullary carcinoma of the thyroid (MTC), osteoporosis, Paget's disease, peripheral amyloidosis, amyotrophic lateral sclerosis (ALS), frontotemporal lobar degeneration (FTLD), hyperglycemia, light chain amyloidosis (AL), a synucleinopathy, Parkinson's disease, dementia with Lewy bodies, progressive supranuclear palsy, corticobasal degeneration, Pick's disease, TDP-43 proteopathy, TTR amyloidosis (ATTR), uromodulin-associated kidney disease, rheumatoid arthritis, inflammatory arthritis, spondyloarthropathies, juvenile idiopathic arthritis, ankylosing spondylitis, psoriatic arthritis, inflammatory bowel disease, ulcerative colitis, Crohn's disease, celiac disease, vasculitis, sarcoidosis, familial Mediterranean fever, tumor necrosis factor receptor-associated periodic syndrome (TRAPS), cancer, aging promoted by amyloid aggregation, or any combination thereof.

[0498] In some embodiments, the protein is in a cell. In some embodiments, the protein comprises α-synuclein, tau protein, phospho tau, TAR DNA binding protein (TDP-43), transthyretin, uromodulin, islet amyloid polypeptide (IAPP), serum amyloid A (SAA), p53, apolipoprotein E (APOE), APOE-4, prion protein, fibrin, neurofilament light (NFL), CRP, SUMO, light chain, platelet-derived growth factor receptor (PDGFR), melanoma cell adhesion molecule (MCAM), complement protein C3, complement protein C9, lysozyme, insulin, native haemoglobin (Hb), glycosylated haemoglobin (HbAIC), phenylalanine (Phe), glutamine (Gln), cholesteryl (co-esteryl), cholesterol, neuroserpin, crystallin AA, crystallin AB, cystatin-C, myostatin pro-peptide, Atrial Natriuretic Peptide (ANP), B-Type Natriuretic Peptide (BNP), or any combination therein.

[0499] In some embodiments, the anti-Gal3 blocking antibody, or binding fragment thereof, blocks binding of TB001, TB006, 12G5.D7, 13A12.2E5, 14H10.2C9, 15F10.2D6, 19B5.2E6, 20D11.2C6, 20H5.A3, 23H9.2E4, 2D10.2B2, 3B11.2G2, 7D8.2D8, mIMT001, 4A11.2B5, 4A11.H1L1, 4A11.H4L2, 4G2.2G6, 6B3.2D3, 6H6.2D6, 9H2.2H10, 13G4.2F8, 13H12.2F8, 15G7.2A7, 19D9.2E5, 23B10.2B12, 24D12.2H9, F846C.1B2, F846C.1F5, F846C.1H12, F846C.1H5, F846C.2H3, F846TC.14A2, F846TC.14E4, F846TC.16B5, F846TC.7F10, F847C.10B9, F847C.11B1, F847C.12F12, F847C.26F5, F847C.4B10, F849C.8D10, F849C.8H3, 846.2B11, 846.4D5, 846T.1H2, 847.14H4, 846.2D4, 846.2F11, 846T.10B1, 846T.2E3, 846T.4C9, 846T.4E11, 846T.4F5, 846T.8D1, 847.10C9, 847.11D6, 847.15D12, 847.15F9, 847.15H11, 847.20H7, 847.21B11, 847.27B9, 847.28D1, 847.2B8, 847.3B3, 849.1D2, 849.2D7, 849.2F12, 849.4B2, 849.4F12, 849.4F2, 849.5C2, 849.8D12, F847C.21H6, 849.5H1, 847.23F11, 847.16D10, 847.13E2-mH0mL1, 847.13E2-mH0mL2, 847.12C4, 847.4D3, 2D10-VH0-VL0, 2D10-hVH4-HVL1, 2D10-hVH4-HVL2, 2D10-hVH4-HVL3, 2D10-hVH4-HVL4, 2D10-hVH3-HVL1, 2D10-hVH3-HVL2, 2D10-hVH3-HVL3, 2D10-hVH3-HVL4, 20H5.A3-VH3VL1, 20H5.A3-VH3VL3, 20H5.A3-VH4VL1, 20H5.A3-VH5VL1, 20H5.A3-VH5VL3, 20H5.A3-VH6VL1, 20H5.A3-VH6VL3, 2D10-VH0-VL0, 2D10-hVH4-HVL1, 2D10-hVH4-HVL2, 2D10-hVH4-HVL3, 2D10-hVH4-HVL4, 2D10-hVH3-HVL1, 2D10-hVH3-HVL2, 2D10-hVH3-HVL3, 2D10-hVH3-HVL4, 21H6-H0L0, 21H6-H1L1, 21H6-H1L2, 21H6-H1L3, 21H6-H1L4, 21H6-H2L1, 21H6-H2L2, 21H6-H2L3, 21H6-H2L4, 21H6-H3L1, 21H6-H3L2, 21H6-H3L3, 21H6-H3L4, 21H6-H4L1, 21H6-H4L2, 21H6-H4L3, 21H6-H4L4, 21H6-H5L1, 21H6-H5L2, 21H6-H5L3, 21H6-H5L4, 21H6-H6L1, 21H6-H6L2, 21H6-H6L3, and/or 21H6-H6L4, to Gal-3. In some embodiments, any antibody (human, humanized, or not) that competes for binding to any one or more of the proceeding antibodies (optionally at, at least 80% competition as defined in the present examples), can be used in the method as well. In some embodiments, the antibody binds to the same or overlapping epitope of any one or more of the preceding antibodies.

[0500] In some embodiments, the anti-Gal3 blocking antibody blocks anti-Gal3 antibody binding to Gal3 by about 50%, 60%, 70% 75%, 80%, 81%, 82%, 83%, 84%, 85%, 86%, 87%, 88%, 89%, 90%, 91%, 92%, 93%, 94%, 95%, 96%, 97%, 98%, or 99% as compared to anti-Gal3 antibody binding in the absence of the anti-Gal3 blocking antibody, or blocks anti-Gal3 antibody binding to Gal3 by a range that is defined by any two of the preceding values. For example, in some embodiments, the anti-Gal3 blocking antibody blocks anti-Gal3 antibody binding by between about 50% and 100%, 50% and 95%, 50% and 90%, 50% and 85%, 50% and 80%, 50% and 75%, 50% and 70%, 50% and 60%, 60% and 100%, 60% and 95%, 60% and 90%, 60% and 85%, 60% and 80%, 60% and 75%, 75% and 100%, 75% and 95%, 75% and 90%, or 75% and 85%, as compared to anti-Gal3 antibody binding in the absence of the anti-Gal3 blocking antibody.

[0501] In some embodiments, the anti-Gal3 blocking antibody binds to one or more of the same epitopes as the anti-Gal3 antibody.

[0502] In some embodiments, the anti-Gal3 blocking antibody inhibits Gal3-mediated amyloid aggregation with at least 50%, 60%, 70%, 80%, 90%, 100% efficiency as compared to anti-Gal3 antibody binding in the absence of anti-Gal3 blocking antibody, or with an efficiency in a range that is defined by any two of the preceding values. For example, in some embodiments, binding of the anti-Gal3 blocking antibody inhibits Gal3-mediated amyloid aggregation with at least 50%-100%, 50%-90%, 50%-80%, 50%-70%, or 70%-100% efficiency as compared to anti-Gal3 antibody binding in the absence of anti-Gal3 blocking antibody. In some embodiments, the anti-Gal3 blocking antibody inhibits Gal3-mediated amyloid aggregation with at least 1-fold, 2-fold, 3-fold, 4-fold, 5-fold, 6-fold, 7-fold, 8-fold, 9-fold, or 10-fold efficiency as compared to anti-Gal3 antibody binding in the absence of anti-Gal3 blocking antibody, or with an efficiency in a range that is defined by any two of the preceding values. For example, in some embodiments, binding of the anti-Gal3 blocking antibody inhibits Gal3-mediated amyloid aggregation with at least 1-fold to 10-fold, 1-fold to 7-fold, 1-fold to 5-fold, 1 fold-3 fold, 3-fold to 10-fold, 3-fold to 7-fold, 3-fold to 5-fold, 5-fold to 10-fold, or 5-fold to 7-fold, efficiency as compared to anti-Gal3 antibody binding in the absence of anti-Gal3 blocking antibody.

[0503] In some embodiments, administration of the anti-Gal3 blocking antibody treats the Gal3-mediated amyloid proteopathy in the subject with at least 50%, 60%, 70%, 80%, 90%, 100% efficiency as compared to anti-Gal3 antibody in the absence of anti-Gal3 blocking antibody, or with an efficiency in a range that is defined by any two of the preceding values. For example, in some embodiments, administration of the anti-Gal3 blocking antibody treats the Gal3-mediated amyloid proteopathy in the subject with at least 50%-100%, 50%-90%, 50%-80%, 50%-70%, or 70%-100% efficiency as compared to anti-Gal3 antibody in the absence of anti-Gal3 blocking antibody. In some embodiments, administration of the anti-Gal3 blocking antibody treats the Gal3-mediated amyloid proteopathy in the subject with at least 1-fold, 2-fold, 3-fold, 4-fold, 5-fold, 6-fold, 7-fold, 8-fold, 9-fold, or 10-fold efficiency as compared to anti-Gal3 antibody binding in the absence of anti-Gal3 blocking antibody, or with an efficiency in a range that is defined by any two of the preceding values. For example, in some embodiments, administration of the anti-Gal3 blocking antibody treats the Gal3-mediated amyloid proteopathy in the subject with at least 1-fold to 10-fold, 1-fold to 7-fold, 1-fold to 5-fold, 1 fold-3 fold, 3-fold to 10-fold, 3-fold to 7-fold, 3-fold to 5-fold, 5-fold to 10-fold, or 5-fold to 7-fold, efficiency as compared to anti-Gal3 antibody binding in the absence of anti-Gal3 blocking antibody.

### Protein Aggregate Compositions and Kits

[0504] Also disclosed herein are compositions comprising a protein and Gal3. In some embodiments, Gal3 promotes amyloid aggregation and/or oligomerization of the protein in the composition. In some embodiments, the protein and Gal3 are in aqueous solution, or are dried and/or lyophilized. In some embodiments, the protein α-synuclein, tau protein, TDP-43, transthyretin, uromodulin, islet amyloid polypeptide (IAPP), serum amyloid A (SAA), p53, apolipoprotein E (APOE), APOE-4, prion protein, fibrin, or neurofilament light (NFL), CRP, SUMO, light chain, platelet-derived growth factor receptor (PDGFR), melanoma cell adhesion molecule (MCAM), complement proteins C3 and/or C9, lysozyme, insulin, native haemoglobin (Hb), glycosylated haemoglobin (HbAIC), phenylalanine (Phe), glutamine (Gln), cholesteryl (co-esteryl), cholesterol, neuroserpin, Crystallin AA and/or Crystallin AB, cystatin-C, or myostatin propeptide, or any combination thereof. In some embodiments, the tau protein is 4R tau and/or phosphorylated tau (phospho tau). In some embodiments, the phosphorylated tau is phospho-tau (S396). In some embodiments, the phosphorylated tau forms trimers, tetramers, or higher order oligomers when contacted with Gal3.

[0505] Also disclosed herein are kits comprising any of the compositions disclosed herein, such as the compositions comprising the protein and Gal3. The compositions and kits provided herein may be used for biological assays studying amyloid aggregation and/or oligomerization, which has been implicated in various pathologies. As demonstrated herein, Gal3 promotes aggregation and/or oligomerization of the proteins on a time scale that is much faster than conventional methods. For example, in some embodiments, amyloid aggregation and/or oligomerization of tau protein is intended to be achieved more rapidly compared to spontaneous aggregation and/or oligomerization of tau protein alone, or aggregation and/or oligomerization of tau protein when mixed with heparin and/or arachnoid acid. In some embodiments, amyloid aggregation and/or oligomerization of the tau protein is intended to be achieved more rapidly compared to aggregation and/or oligomerization of tau protein when mixed with heparin and/or arachnoid acid at 37° C. or about 37° C. In some embodiments, amyloid aggregation and/or oligomerization of the tau protein is intended to be achieved with no more than 0.5, 1, 2, 3, 4, 5, 6, 7, 8, 9, 10, 11, 12, 13, 14, 15, 16, 17, 18, 19, 20, 21, 22, 23, or 24 hours of contacting the tau protein with Gal3. This aggregation and/or oligomerization of tau protein by Gal3 occurs faster than previous methods, such as those involving the use of heparin and/or arachnoid acid. The kits disclosed herein may further include instructions detailing the time scales and temperatures to accomplish amyloid aggregation and/or oligomerization with the use of Gal3.

[0506] In some embodiments, the protein of the compositions or kits is intended to be contacted with Gal3 at a temperature of about 10, 11, 12, 13, 14, 15, 16, 17, 18, 19, 20, 21, 22, 23, 24, 25, 26, 27, 28, 29, 30, 31, 32, 33, 34, 35, 36, 37, 38, 39, 40, 41, 42, 43, 44, or 45° C., or any temperature within a range defined by any two of the aforementioned temperatures. In some embodiments, the protein of the compositions or kits is intended to be is contacted with Gal3 at body temperature, 37° C., or about 37° C. In some embodiments, the protein of the compositions or kits is intended to be is contacted with Gal3 below body temperature, below 37° C., or below about 37° C. In some embodiments, the protein of the compositions or kits is intended to be is contacted with Gal3 at room temperature or about room temperature. In some embodiments, the protein of the compositions or kits is intended to be is contacted with Gal3 at a temperature of about 18, 19, 20, 21, 22, 23, or 24° C., or any temperature within a range defined by any two of the aforementioned temperatures.

[0507] Accordingly, the compositions and kits provided herein have an advantage over alternative methods of forming protein aggregates and/or oligomers for study. Diseases that these compositions and kits may be useful for study are provided in the present disclosure, and may include a synucleinopathy, Parkinson's disease, dementia with Lewy bodies, multiple system atrophy, tauopathy, Alzheimer's disease, progressive supranuclear palsy, corticobasal degeneration, Pick's disease, TDP-43 proteopathy, amyotrophic lateral sclerosis, frontotemporal lobar degeneration, TTR amyloidosis (ATTR), cardiac amyloidosis, uromodulin-associated kidney disease, IAPP amyloidosis, SAA amyloidosis, rheumatoid arthritis, inflammatory arthritis, spondyloarthropathies, juvenile idiopathic arthritis, ankylosing spondylitis, psoriatic arthritis, inflammatory bowel disease, ulcerative colitis, Crohn's disease, celiac disease, vasculitis, sarcoidosis, familial Mediterranean fever, tumor necrosis factor receptor-associated periodic syndrome (TRAPS), cancer, aging promoted by amyloid aggregation, or any combination thereof.

### Pharmaceutical Formulations

[0508] A pharmaceutical formulation for treating a disease, such as in embodiments of the methods described herein, can comprise an anti-Gal3 antibody or binding fragment thereof described supra. The anti-Gal3 antibody or binding fragment thereof can be formulated for systemic administration. Alternatively, the anti-Gal3 antibody or binding fragment thereof can be formulated for parenteral administration.

[0509] In some embodiments, an anti-Gal3 antibody or binding fragment thereof is formulated as a pharmaceutical composition for administration to a subject by, but not limited to, parenteral (e.g., intravenous, subcutaneous, intramuscular, intraarterial, intradermal, intraperitoneal, intravitreal, intracerebral, or intracerebroventricular), oral, intranasal, buccal, rectal, or transdermal administration routes. In some instances, the pharmaceutical composition describe herein is formulated for parenteral (e.g., intravenous, subcutaneous, intramuscular, intraarterial, intradermal, intraperitoneal, intravitreal, intracerebral, or intracerebroventricular) administration. In other instances, the pharmaceutical composition describe herein is formulated for systemic administration. In other instances, the pharmaceutical composition describe herein is formulated for oral administration. In still other instances, the pharmaceutical composition describe herein is formulated for intranasal administration.

[0510] In some instances, the pharmaceutical compositions further include pH adjusting agents or buffering agents which include acids such as acetic, boric, citric, lactic, phosphoric and hydrochloric acids; bases such as sodium hydroxide, sodium phosphate, sodium borate, sodium citrate, sodium acetate, sodium lactate and tris-hydroxymethylaminomethane; and buffers such as citrate/dextrose, sodium bicarbonate and ammonium chloride. Such acids, bases and buffers are included in an amount required to maintain pH of the composition in an acceptable range.

[0511] In some instances, the pharmaceutical compositions include one or more salts in an amount required to bring osmolality of the composition into an acceptable range. Such salts include those having sodium, potassium or ammonium cations and chloride, citrate, ascorbate, borate, phosphate, bicarbonate, sulfate, thiosulfate or bisulfite anions; suitable salts include sodium chloride, potassium chloride, sodium thiosulfate, sodium bisulfite and ammonium sulfate.

[0512] In some instances, the pharmaceutical compositions further include diluent which are used to stabilize compounds because they can provide a more stable environment. Salts dissolved in buffered solutions (which also can provide pH control or maintenance) are utilized as diluents in the art, including, but not limited to a phosphate buffered saline solution. In certain instances, diluents increase bulk of the composition to facilitate compression or create sufficient bulk for homogenous blend for capsule filling. Such compounds can include e.g., lactose, starch, mannitol, sorbitol, dextrose, microcrystalline cellulose such as Avicel®; dibasic calcium phosphate, dicalcium phosphate dihydrate; tricalcium phosphate, calcium phosphate; anhydrous lactose, spray-dried lactose; pregelatinized starch, compressible sugar, such as Di-Pac® (Amstar); mannitol, hydroxypropylmethylcellulose, hydroxypropylmethylcellulose acetate stearate, sucrose-based diluents, confectioner's sugar; monobasic calcium sulfate monohydrate, calcium sulfate dihydrate; calcium lactate trihydrate, dextrates; hydrolyzed cereal solids, amylose; powdered cellulose, calcium carbonate; glycine, kaolin; mannitol, sodium chloride; inositol, bentonite, and the like.

[0513] In some embodiments, the pharmaceutical formulations include, but are not limited to, aqueous liquid dispersions, self-emulsifying dispersions, solid solutions, liposomal dispersions, aerosols, solid dosage forms, powders, immediate release formulations, controlled release formulations, fast melt formulations, tablets, capsules, pills, delayed release formulations, extended release formulations, pulsatile release formulations, multi-particulate formulations (e.g., nanoparticle formulations), and mixed immediate and controlled release formulations.

### Therapeutic Regimens

[0514] In some embodiments, the anti-Gal3 antibodies or binding fragments thereof disclosed herein are administered for therapeutic applications, such as in embodiments of the methods disclosed herein. In some embodiments, the anti-Gal3 antibody or binding fragment thereof is administered once per day, twice per day, three times per day or more. The anti-Gal3 antibody or binding fragment thereof is administered daily, every day, every alternate day, five days a week, once a week, every other week, two weeks per month, three weeks per month, once a month, twice a month, three times per month, or more. In some embodiments, the anti-Gal3 antibody or binding fragment thereof is administered for at least 1 month, 2 months, 3 months, 4 months, 5 months, 6 months, 7 months, 8 months, 9 months, 10 months, 11 months, 12 months, 18 months, 2 years, 3 years, or more.

[0515] In the case wherein the patient's status does improve, upon the doctor's discretion the administration of the anti-Gal3 antibody or binding fragment thereof is given continuously; alternatively, the dose of the anti-Gal3 antibody or binding fragment thereof being administered is temporarily reduced or temporarily suspended for a certain length of time (i.e., a “drug holiday”). In some instances, the length of the drug holiday varies between 2 days and 1 year, including by way of example only, 2 days, 3 days, 4 days, 5 days, 6 days, 7 days, 10 days, 12 days, 15 days, 20 days, 28 days, 35 days, 50 days, 70 days, 100 days, 120 days, 150 days, 180 days, 200 days, 250 days, 280 days, 300 days, 320 days, 350 days, or 365 days. The dose reduction during a drug holiday is from 10%-100%, including, by way of example only, 10%, 15%, 20%, 25%, 30%, 35%, 40%, 45%, 50%, 55%, 60%, 65%, 70%, 75%, 80%, 85%, 90%, 95%, or 100%.

[0516] Once improvement of the patient's condition has occurred, a maintenance dose is administered if necessary. Subsequently, the dosage or the frequency of administration, or both, can be reduced, as a function of the symptoms, to a level at which the treated disease, disorder, or condition is retained.

[0517] In some embodiments, the amount of a given agent that correspond to such an amount varies depending upon factors such as the particular compound, the severity of the disease, the identity (e.g., weight) of the subject or host in need of treatment, but nevertheless is routinely determined in a manner known in the art according to the particular circumstances surrounding the case, including, e.g., the specific agent being administered, the route of administration, and the subject or host being treated. In some instances, the desired dose is conveniently presented in a single dose or as divided doses administered simultaneously (or over a short period of time) or at appropriate intervals, for example as two, three, four or more sub-doses per day.

[0518] The foregoing ranges are merely suggestive, as the number of variables in regard to an individual treatment regime is large, and considerable excursions from these recommended values are not uncommon. Such dosages are altered depending on a number of variables, not limited to the activity of the compound used, the disease or condition to be treated, the mode of administration, the requirements of the individual subject, the severity of the disease or condition being treated, and the judgment of the practitioner.

[0519] In some embodiments, toxicity and therapeutic efficacy of such therapeutic regimens are determined by standard pharmaceutical procedures in cell cultures or experimental animals, including, but not limited to, the determination of the LD50 (the dose lethal to 50% of the population) and the ED50 (the dose therapeutically effective in 50% of the population). The dose ratio between the toxic and therapeutic effects is the therapeutic index and it is expressed as the ratio between LD50 and ED50. Compounds exhibiting high therapeutic indices are preferred. The data obtained from cell culture assays and animal studies are used in formulating a range of dosage for use in human. The dosage of such compounds lies preferably within a range of circulating concentrations that include the ED50 with minimal toxicity. The dosage varies within this range depending upon the dosage form employed and the route of administration utilized.

### Polynucleotides and Vectors

[0520] In some embodiments, the present disclosure provides isolated nucleic acids encoding any of the anti-Gal3 antibodies or binding fragments thereof disclosed herein. In another embodiment, the present disclosure provides vectors comprising a nucleic acid sequence encoding any anti-Gal3 antibody or binding fragment thereof disclosed herein. In some embodiments, this disclosure provides isolated nucleic acids that encode heavy chain variable regions, light chain variable regions, heavy chains, or light chains of an anti-Gal3 antibody or binding fragment thereof disclosed herein.

[0521] In some embodiments, nucleic acid sequences encoding for heavy chain variable regions are depicted in FIG. 21 (SEQ ID NOs: 539-620, 797, 866-880, 1011-1024, 1239-1281, 1515-1539). In some embodiments, nucleic acid sequences encoding for light chain variable regions are depicted in FIG. 22 (SEQ ID NOs: 621-702, 798, 881-895, 1025-1038, 1282-1324, 1540-1564). In some embodiments, nucleic acid sequences encoding for heavy chains are depicted in FIG. 23 (SEQ ID NO: 703-749, 799, 896-910, 1039-1052, 1325-1367, 1565-1589). In some embodiments, nucleic acid sequences encoding for light chains are depicted in FIG. 24 (SEQ ID NO: 750-796, 800, 911-925, 1053-1066, 1368-1410, 1590-1614). In some embodiments, any of the compositions or methods provided herein can include one or more of the antibody components encoded by the nucleic acids provided herein.

[0522] Any one of the anti-Gal3 antibodies or binding fragments thereof described herein can be prepared by recombinant DNA technology, synthetic chemistry techniques, or a combination thereof. For instance, sequences encoding the desired components of the anti-Gal3 antibodies, including light chain CDRs and heavy chain CDRs are typically assembled cloned into an expression vector using standard molecular techniques know in the art. These sequences may be assembled from other vectors encoding the desired protein sequence, from PCR-generated fragments using respective template nucleic acids, or by assembly of synthetic oligonucleotides encoding the desired sequences. Expression systems can be created by transfecting a suitable cell with an expressing vector which comprises an anti-Gal3 antibody of interest or binding fragment thereof.

[0523] Nucleotide sequences corresponding to various regions of light or heavy chains of an existing antibody can be readily obtained and sequenced using convention techniques including but not limited to hybridization, PCR, and DNA sequencing. Hybridoma cells that produce monoclonal antibodies serve as a preferred source of antibody nucleotide sequences. A vast number of hybridoma cells producing an array of monoclonal antibodies may be obtained from public or private repositories. The largest depository agent is American Type Culture Collection, which offers a diverse collection of well-characterized hybridoma cell lines. Alternatively, antibody nucleotides can be obtained from immunized or non-immunized rodents or humans, and form organs such as spleen and peripheral blood lymphocytes. Specific techniques applicable for extracting and synthesizing antibody nucleotides are described in Orlandi et al. (1989) Proc. Natl. Acad. Sci. U.S.A. 86: 3833-3837; Larrick et al. (1989) Biochem. Biophys. Res. Commun. 160:1250-1255; Sastry et al. (1989) Proc. Natl. Acad. Sci., U.S.A. 86: 5728-5732; and U.S. Pat. No. 5,969,108.

[0524] Polynucleotides encoding anti-Gal3 antibodies or binding fragments thereof can also be modified, for example, by substituting the coding sequence for human heavy and light chain constant regions in place of the homologous non-human sequences. In that manner, chimeric antibodies are prepared that retain the binding specificity of the original anti-Gal3 antibody or binding fragment thereof.

[0525] Also disclosed herein are methods of producing an anti-Gal3 antibody or binding fragment thereof. In some embodiments, the methods comprise expressing a nucleic acid that encodes for the anti-Gal3 antibody or binding fragment thereof in a cell and isolating the expressed anti-Gal3 antibody or binding fragment thereof from the cell. In some embodiments, the methods further comprise concentrating the anti-Gal3 antibody or binding fragment thereof to a desired concentration. In some embodiments, the cell is a mammalian cell, insect cell, or bacterial cell. In some embodiments, the anti-Gal3 antibody or binding fragment thereof is any one of the anti-Gal3 antibodies or binding fragments disclosed herein. Specific procedures of expressing antibodies in a cell and isolation of the expressed antibodies are conventionally known and can be practiced by one skilled in the art.

### Antibody Production

[0526] In some cases, anti-Gal3 antibodies or binding fragments thereof are raised by standard protocol by injecting a production animal with an antigenic composition. See, e.g., Harlow and Lane, Antibodies: A Laboratory Manual, Cold Spring Harbor Laboratory, 1988. When utilizing an entire protein, or a larger section of the protein, antibodies may be raised by immunizing the production animal with the protein and a suitable adjuvant (e.g., Freund's, Freund's complete, oil-in-water emulsions, etc.). When a smaller peptide is utilized, it is advantageous to conjugate the peptide with a larger molecule to make an immunostimulatory conjugate. Commonly utilized conjugate proteins that are commercially available for such use include bovine serum albumin (BSA) and keyhole limpet hemocyanin (KLH). In order to raise antibodies to particular epitopes, peptides derived from the full sequence may be utilized. Alternatively, in order to generate antibodies to relatively short peptide portions of the protein target, a superior immune response may be elicited if the polypeptide is joined to a carrier protein, such as ovalbumin, BSA or KLH.

[0527] Polyclonal or monoclonal anti-Gal3 antibodies or binding fragments thereof can be produced from animals which have been genetically altered to produce human immunoglobulins. A transgenic animal can be produced by initially producing a “knock-out” animal which does not produce the animal's natural antibodies, and stably transforming the animal with a human antibody locus (e.g., by the use of a human artificial chromosome). In such cases, only human antibodies are then made by the animal. Techniques for generating such animals, and deriving antibodies therefrom, are described in U.S. Pat. Nos. 6,162,963 and 6,150,584, each incorporated fully herein by reference in its entirety. Such antibodies can be referred to as human xenogenic antibodies.

[0528] Alternatively, anti-Gal3 antibodies or binding fragments thereof can be produced from phage libraries containing human variable regions. See U.S. Pat. No. 6,174,708, incorporated fully herein by reference in its entirety.

[0529] In some aspects of any of the embodiments disclosed herein, an anti-Gal3 antibody or binding fragment thereof is produced by a hybridoma.

[0530] For monoclonal anti-Gal3 antibodies, hybridomas may be formed by isolating the stimulated immune cells, such as those from the spleen of the inoculated animal. These cells can then be fused to immortalized cells, such as myeloma cells or transformed cells, which are capable of replicating indefinitely in cell culture, thereby producing an immortal, immunoglobulin-secreting cell line. The immortal cell line utilized can be selected to be deficient in enzymes necessary for the utilization of certain nutrients. Many such cell lines (such as myelomas) are known to those skilled in the art, and include, for example: thymidine kinase (TK) or hypoxanthine-guanine phosphoriboxyl transferase (HGPRT). These deficiencies allow selection for fused cells according to their ability to grow on, for example, hypoxanthine aminopterinthymidine medium (HAT).

[0531] In addition, the anti-Gal3 antibody or binding fragment thereof may be produced by genetic engineering.

[0532] Anti-Gal3 antibodies or binding fragments thereof disclosed herein can have a reduced propensity to induce an undesired immune response in humans, for example, anaphylactic shock, and can also exhibit a reduced propensity for priming an immune response which would prevent repeated dosage with an antibody therapeutic or imaging agent (e.g., the human-anti-murine-antibody “HAMA” response). Such anti-Gal3 antibodies or binding fragments thereof include, but are not limited to, humanized, chimeric, or xenogenic human anti-Gal3 antibodies or binding fragments thereof.

[0533] Chimeric anti-Gal3 antibodies or binding fragments thereof can be made, for example, by recombinant means by combining the murine variable light and heavy chain regions (VK and VH), obtained from a murine (or other animal-derived) hybridoma clone, with the human constant light and heavy chain regions, in order to produce an antibody with predominantly human domains. The production of such chimeric antibodies is well known in the art and may be achieved by standard means (as described, e.g., in U.S. Pat. No. 5,624,659, incorporated fully herein by reference).

[0534] The term “humanized” as applies to a non-human (e.g. rodent or primate) antibodies are hybrid immunoglobulins, immunoglobulin chains or fragments thereof which contain minimal sequence derived from non-human immunoglobulin. For the most part, humanized antibodies are human immunoglobulins (recipient antibody) in which residues from a complementary determining region (CDR) of the recipient are replaced by residues from a CDR of a non-human species (donor antibody) such as mouse, rat, rabbit or primate having the desired specificity, affinity and capacity. In some instances, Fv framework region (FR) residues of the human immunoglobulin are replaced by corresponding non-human residues. Furthermore, the humanized antibody may comprise residues which are found neither in the recipient antibody nor in the imported CDR or framework sequences. These modifications are made to further refine and optimize antibody performance and minimize immunogenicity when introduced into a human body. In some examples, the humanized antibody will comprise substantially all of at least one, and typically two, variable domains, in which all or substantially all of the CDR regions correspond to those of a non-human immunoglobulin and all or substantially all of the FR regions are those of a human immunoglobulin sequence. The humanized antibody may also comprise at least a portion of an immunoglobulin constant region (Fc), typically that of a human immunoglobulin.

[0535] Humanized antibodies can be engineered to contain human-like immunoglobulin domains and incorporate only the complementarity-determining regions of the animal-derived antibody. This can be accomplished by carefully examining the sequence of the hyper-variable loops of the variable regions of a monoclonal antigen binding unit or monoclonal antibody and fitting them to the structure of a human antigen binding unit or human antibody chains. See, e.g., U.S. Pat. No. 6,187,287, incorporated fully herein by reference.

[0536] Methods for humanizing non-human antibodies are well known in the art. “Humanized” antibodies are antibodies in which at least part of the sequence has been altered from its initial form to render it more like human immunoglobulins. In some versions, the heavy (H) chain and light (L) chain constant (C) regions are replaced with human sequence. This can be a fusion polypeptide comprising a variable (V) region and a heterologous immunoglobulin C region. In some versions, the complementarity determining regions (CDRs) comprise non-human antibody sequences, while the V framework regions have also been converted to human sequences. See, for example, EP 0329400. In some versions, V regions are humanized by designing consensus sequences of human and mouse V regions and converting residues outside the CDRs that are different between the consensus sequences.

[0537] In principle, a framework sequence from a humanized antibody can serve as the template for CDR grafting; however, it has been demonstrated that straight CDR replacement into such a framework can lead to significant loss of binding affinity to the antigen. Glaser et al. (1992) J. Immunol. 149:2606; Tempest et al. (1992) Biotechnology 9:266; and Shalaby et al. (1992) J. Exp. Med. 17:217. The more homologous a human antibody (HuAb) is to the original murine antibody (muAb), the less likely that the human framework will introduce distortions into the murine CDRs that could reduce affinity. Based on a sequence homology search against an antibody sequence database, the HuAb IC4 provides good framework homology to muM4T S.22, although other highly homologous HuAbs would be suitable as well, especially kappa L chains from human subgroup I or H chains from human subgroup III. Kabat et al. (1987). Various computer programs such as ENCAD (Levitt et al. (1983) J. Mol. Biol. 168:595) are available to predict the ideal sequence for the V region. The disclosure thus encompasses HuAbs with different variable (V) regions. It is within the skill of one in the art to determine suitable V region sequences and to optimize these sequences. Methods for obtaining antibodies with reduced immunogenicity are also described in U.S. Pat. No. 5,270,202 and EP 699,755, each hereby incorporated by reference in its entirety.

[0538] Humanized antibodies can be prepared by a process of analysis of the parental sequences and various conceptual humanized products using three dimensional models of the parental and humanized sequences. Three-dimensional immunoglobulin models are familiar to those skilled in the art. Computer programs are available which illustrate and display probable three-dimensional conformational structures of selected candidate immunoglobulin sequences. Inspection of these displays permits analysis of the likely role of the residues in the functioning of the candidate immunoglobulin sequence, i.e., the analysis of residues that influence the ability of the candidate immunoglobulin to bind its antigen. In this way, FR residues can be selected and combined from the consensus and import sequence so that the desired antibody characteristic, such as increased affinity for the target antigen(s), is achieved.

[0539] A process for humanization of subject antigen binding units can be as follows. The best-fit germline acceptor heavy and light chain variable regions are selected based on homology, canonical structure and physical properties of the human antibody germlines for grafting. Computer modeling of mVH/VL versus grafted hVH/VL is performed and prototype humanized antibody sequence is generated. If modeling indicated a need for framework back-mutations, second variant with indicated FW changes is generated. DNA fragments encoding the selected germline frameworks and murine CDRs are synthesized. The synthesized DNA fragments are subcloned into IgG expression vectors and sequences are confirmed by DNA sequencing. The humanized antibodies are expressed in cells, such as 293F and the proteins are tested, for example in MDM phagocytosis assays and antigen binding assays. The humanized antigen binding units are compared with parental antigen binding units in antigen binding affinity, for example, by FACS on cells expressing the target antigen. If the affinity is greater than 2-fold lower than parental antigen binding unit, a second round of humanized variants can be generated and tested as described above.

[0540] As noted above, an anti-Gal3 antibody or binding fragment thereof can be either “monovalent” or “multivalent.” Whereas the former has one binding site per antigen-binding unit, the latter contains multiple binding sites capable of binding to more than one antigen of the same or different kind. Depending on the number of binding sites, antigen binding units may be bivalent (having two antigen-binding sites), trivalent (having three antigen-binding sites), tetravalent (having four antigen-binding sites), and so on.

[0541] Multivalent anti-Gal3 antibodies or binding fragments thereof can be further classified on the basis of their binding specificities. A “monospecific” anti-Gal3 antibody or binding fragment thereof is a molecule capable of binding to one or more antigens of the same kind. A “multispecific” anti-Gal3 antibody or binding fragment thereof is a molecule having binding specificities for at least two different antigens. While such molecules normally will only bind two distinct antigens (i.e. bispecific anti-Gal3 antibodies), antibodies with additional specificities such as trispecific antibodies are encompassed by this expression when used herein. This disclosure further provides multispecific anti-Gal3 antibodies. Multispecific anti-Gal3 antibodies or binding fragments thereof are multivalent molecules capable of binding to at least two distinct antigens, e.g., bispecific and trispecific molecules exhibiting binding specificities to two and three distinct antigens, respectively.

[0542] In some embodiments, the methods further provide for screening for or identifying antibodies or binding fragments thereof capable of disrupting an interaction between Gal3 and a target protein. In some aspects, the method may comprise: (a) contacting Gal3 protein with an antibody or binding fragment thereof that selectively binds to Gal3, thereby forming a Gal3-antibody complex; (b) contacting the Gal3-antibody complex with the target protein; (c) removing unbound target protein; and (d) detecting the target protein bound to the Gal3-antibody complex, wherein the antibody or binding fragment thereof is capable of disrupting an interaction of Gal3 and the target protein when the target protein is not detected in (d). In some cases, the method comprises an immunoassay. In some cases, the immunoassay is an enzyme-linked immunosorbent assay (ELISA).

### Host Cells

[0543] In some embodiments, the present disclosure provides host cells expressing any one of the anti-Gal3 antibodies or binding fragments thereof disclosed herein. A subject host cell typically comprises a nucleic acid encoding any one of the anti-Gal3 antibodies or binding fragments thereof disclosed herein.

[0544] The disclosure provides host cells transfected with the polynucleotides, vectors, or a library of the vectors described above. The vectors can be introduced into a suitable prokaryotic or eukaryotic cell by any of a number of appropriate means, including electroporation, microprojectile bombardment; lipofection, infection (where the vector is coupled to an infectious agent), transfection employing calcium chloride, rubidium chloride, calcium phosphate, DEAE-dextran, or other substances. The choice of the means for introducing vectors will often depend on features of the host cell.

[0545] For most animal cells, any of the above-mentioned methods is suitable for vector delivery. Preferred animal cells are vertebrate cells, preferably mammalian cells, capable of expressing exogenously introduced gene products in large quantity, e.g. at the milligram level. Non-limiting examples of preferred cells are NIH3T3 cells, COS, HeLa, and CHO cells.

[0546] Once introduced into a suitable host cell, expression of the anti-Gal3 antibodies or binding fragments thereof can be determined using any nucleic acid or protein assay known in the art. For example, the presence of transcribed mRNA of light chain CDRs or heavy chain CDRs, or the anti-Gal3 antibody or binding fragment thereof can be detected and/or quantified by conventional hybridization assays (e.g. Northern blot analysis), amplification procedures (e.g. RT-PCR), SAGE (U.S. Pat. No. 5,695,937), and array-based technologies (see e.g. U.S. Pat. Nos. 5,405,783, 5,412,087 and 5,445,934), using probes complementary to any region of a polynucleotide that encodes the anti-Gal3 antibody or binding fragment thereof.

[0547] Expression of the vector can also be determined by examining the expressed anti-Gal3 antibody or binding fragment thereof. A variety of techniques are available in the art for protein analysis. They include but are not limited to radioimmunoassays, ELISA (enzyme linked immunoradiometric assays), “sandwich” immunoassays, immunoradiometric assays, in situ immunoassays (using e.g., colloidal gold, enzyme or radioisotope labels), western blot analysis, immunoprecipitation assays, immunofluorescent assays, and SDS-PAGE.

### Payload

[0548] In some embodiments, any anti-Gal3 antibody disclosed herein further comprises a payload. In some cases, the payload comprises a small molecule, a protein or functional fragment thereof, a peptide, or a nucleic acid polymer.

[0549] In some cases, the number of payloads conjugated to the anti-Gal3 antibody (e.g., the drug-to-antibody ratio or DAR) is about 1:1, one payload to one anti-Gal3 antibody. In some cases, the ratio of the payloads to the anti-Gal3 antibody is about 2:1, 3:1, 4:1, 5:1, 6:1, 7:1, 8:1, 9:1, 10:1, 11:1, 12:1, 13:1, 14:1, 15:1, 16:1, 17:1, 18:1, 19:1, or 20:1. In some cases, the ratio of the payloads to the anti-Gal3 antibody is about 2:1. In some cases, the ratio of the payloads to the anti-Gal3 antibody is about 3:1. In some cases, the ratio of the payloads to the anti-Gal3 antibody is about 4:1. In some cases, the ratio of the payloads to the anti-Gal3 antibody is about 6:1. In some cases, the ratio of the payloads to the anti-Gal3 antibody is about 8:1. In some cases, the ratio of the payloads to the anti-Gal3 antibody is about 12:1.

[0550] In some embodiment, the payload is a small molecule. In some instances, the small molecule is a cytotoxic payload. Exemplary cytotoxic payloads include, but are not limited to, microtubule disrupting agents, DNA modifying agents, or Akt inhibitors.

[0551] In some embodiments, the payload comprises a microtubule disrupting agent. Exemplary microtubule disrupting agents include, but are not limited to, 2-methoxyestradiol, auristatin, chalcones, colchicine, combretastatin, cryptophycin, dictyostatin, discodermolide, dolastain, eleutherobin, epothilone, halichondrin, laulimalide, maytansine, noscapinoid, paclitaxel, peloruside, phomopsin, podophyllotoxin, rhizoxin, spongistatin, taxane, tubulysin, vinca alkaloid, vinorelbine, or derivatives or analogs thereof.

[0552] In some embodiments, the maytansine is a maytansinoid. In some embodiments, the maytansinoid is DM1, DM4, or ansamitocin. In some embodiments, the maytansinoid is DM1. In some embodiments, the maytansinoid is DM4. In some embodiments, the maytansinoid is ansamitocin. In some embodiments, the maytansinoid is a maytansionid derivative or analog such as described in U.S. Pat. Nos. 5,208,020, 5,416,064, 7,276,497, and 6,716,821 or U.S. Publication Nos. 2013029900 and US20130323268.

[0553] In some embodiments, the payload is a dolastatin, or a derivative or analog thereof. In some embodiments, the dolastatin is dolastatin 10 or dolastatin 15, or derivatives or analogs thereof. In some embodiments, the dolastatin 10 analog is auristatin, soblidotin, symplostatin 1, or symplostatin 3. In some embodiments, the dolastatin 15 analog is cemadotin or tasidotin.

[0554] In some embodiments, the dolastatin 10 analog is auristatin or an auristatin derivative. In some embodiments, the auristatin or auristatin derivative is auristatin E (AE), auristatin F (AF), auristatin E5-benzoylvaleric acid ester (AEVB), monomethyl auristatin E (MMAE), monomethyl auristatin F (MMAF), or monomethyl auristatin D (MMAD), auristatin PE, or auristatin PYE. In some embodiments, the auristatin derivative is monomethyl auristatin E (MMAE). In some embodiments, the auristatin derivative is monomethyl auristatin F (MMAF). In some embodiments, the auristatin is an auristatin derivative or analog such as described in U.S. Pat. Nos. 6,884,869, 7,659,241, 7,498,298, 7,964,566, 7,750,116, 8,288,352, 8,703,714, and 8,871,720.

[0555] In some embodiments, the payload comprises a DNA modifying agent. In some embodiments, the DNA modifying agent comprises DNA cleavers, DNA intercalators, DNA transcription inhibitors, or DNA cross-linkers. In some instances, the DNA cleaver comprises bleomycine A2, calicheamicin, or derivatives or analogs thereof. In some instances, the DNA intercalator comprises doxorubicin, epirubicin, PNU-159682, duocarmycin, pyrrolobenzodiazepine, oligomycin C, daunorubicin, valrubicin, topotecan, or derivatives or analogs thereof. In some instances, the DNA transcription inhibitor comprises dactinomycin. In some instances, the DNA cross-linker comprises mitomycin C.

[0556] In some embodiments, the DNA modifying agent comprises amsacrine, anthracycline, camptothecin, doxorubicin, duocarmycin, enediyne, etoposide, indolinobenzodiazepine, netropsin, teniposide, or derivatives or analogs thereof.

[0557] In some embodiments, the anthracycline is doxorubicin, daunorubicin, epirubicin, idarubicin, mitomycin-C, dactinomycin, mithramycin, nemorubicin, pixantrone, sabarubicin, or valrubicin.

[0558] In some embodiments, the analog of camptothecin is topotecan, irinotecan, silatecan, cositecan, exatecan, lurtotecan, gimatecan, belotecan, rubitecan, or SN-38.

[0559] In some embodiments, the duocarmycin is duocarmycin A, duocarmycin B1, duocarmycin B2, duocarmycin C1, duocarmycin C2, duocarmycin D, duocarmycin SA, or CC-1065. In some embodiments, the enediyne is a calicheamicin, esperamicin, or dynemicin A.

[0560] In some embodiments, the pyrrolobenzodiazepine is anthramycin, abbeymycin, chicamycin, DC-81, mazethramycin, neothramycins A, neothramycin B, porothramycin, prothracarcin, sibanomicin (DC-102), sibiromycin, or tomaymycin. In some embodiments, the pyrrolobenzodiazepine is a tomaymycin derivative, such as described in U.S. Pat. Nos. 8,404,678 and 8,163,736. In some embodiments, the pyrrolobenzodiazepine is such as described in U.S. Pat. Nos. 8,426,402, 8,802,667, 8,809,320, 6,562,806, 6,608,192, 7,704,924, 7,067,511, 7,612,062, 7,244,724, 7,528,126, 7,049,311, 8,633,185, 8,501,934, and 8,697,688 and U.S. Publication No. US20140294868.

[0561] In some embodiments, the pyrrolobenzodiazepine is a pyrrolobenzodiazepine dimer. In some embodiments, the PBD dimer is a symmetric dimer. Examples of symmetric PBD dimers include, but are not limited to, SJG-136 (SG-2000), ZC-423 (SG2285), SJG-720, SJG-738, ZC-207 (SG2202), and DSB-120. In some embodiments, the PBD dimer is an unsymmetrical dimer. Examples of unsymmetrical PBD dimers include, but are not limited to, SJG-136 derivatives such as described in U.S. Pat. Nos. 8,697,688 and 9,242,013 and U.S. Publication No. 20140286970.

[0562] In some embodiments, the payload comprises an Akt inhibitor. In some cases, the Akt inhibitor comprises ipatasertib (GDC-0068) or derivatives thereof.

[0563] In some embodiments, the payload comprises a polymerase inhibitor, including, but not limited to polymerase II inhibitors such as a-amanitin, and poly(ADP-ribose) polymerase (PARP) inhibitors. Exemplary PARP inhibitors include, but are not limited to Iniparib (BSI 201), Talazoparib (BMN-673), Olaparib (AZD-2281), Olaparib, Rucaparib (AG014699, PF-01367338), Veliparib (ABT-888), CEP 9722, MK 4827, BGB-290, or 3-aminobenzamide.

[0564] In some embodiments, the payload comprises a detectable moiety. As used herein, a “detectable moiety” may comprise an atom, molecule, or compound that is useful in diagnosing, detecting or visualizing a location and/or quantity of a target molecule, cell, tissue, organ, and the like. Detectable moieties that can be used in accordance with the embodiments herein include, but are not limited to, radioactive substances (e.g. radioisotopes, radionuclides, radiolabels or radiotracers), dyes, contrast agents, fluorescent compounds or molecules, bioluminescent compounds or molecules, enzyme and enhancing agents (e.g. paramagnetic ions), or specific binding moieties such as streptavidin, avidin, or biotin. In addition, some nanoparticles, for example quantum dots or metal nanoparticles can be suitable for use as a detectable moiety.

[0565] Exemplary radioactive substances that can be used as detectable moieties in accordance with the embodiments herein include, but are not limited to, ¹⁸F, ¹⁸F-FAC, ³²p, ³³p, ⁴⁵Ti, ⁴⁷Sc, ⁵²Fe, ⁵⁹Fe, ⁶²Cu, 64Cu, ⁶⁷ Cu, ⁶⁷Ga, ⁶⁸Ga, ⁷⁵Sc, ⁷⁷As, ⁸⁶Y, ⁹⁰Y, ⁸⁹Sr, ⁸⁹Zr, ⁹⁴Tc, ⁹⁴Tc, ⁹⁹mTc, ⁹⁹Mo, ¹⁰⁵Pd, ¹⁰⁵Rh, ¹¹¹Ag, ¹¹¹In, ¹²³I, ¹²⁴I, ¹²⁵I, ¹³¹I, ¹⁴²Pr, ¹⁴³Pr, ¹⁴⁹Pm, ¹⁵³Sm, ¹⁵⁴⁻¹⁵⁸Gd, ¹⁶¹Tb, ¹⁶⁶Dy, ¹⁶⁶Ho, ¹⁶⁹Er, ¹⁷⁵Lu, ¹⁷⁷Lu, ¹⁸⁶Re, ¹⁸⁸Re, ¹⁸⁹Re, ¹⁹⁴I, ¹⁹⁸Au, ¹⁹⁹Au, ²¹¹At, ²¹¹Pb, ²¹²Bi, ²¹²Pb, ²¹³Bi, ²²³Ra and ²²⁵Ac. Exemplary paramagnetic ions substances that can be used as detectable markers include, but are not limited to ions of transition and lanthanide metals (e.g. metals having atomic numbers of 6 to 9, 21-29, 42, 43, 44, or 57-71). These metals include ions of Cr, V, Mn, Fe, Co, Ni, Cu, La, Ce, Pr, Nd, Pm, Sm, Eu, Gd, Tb, Dy, Ho, Er, Tm, Yb and Lu.

[0566] When the detectable marker is a radioactive metal or paramagnetic ion, in some embodiments, the marker can be reacted with a reagent having a long tail with one or more chelating groups attached to the long tail for binding these ions. The long tail can be a polymer such as a polylysine, polysaccharide, or other derivatized or derivatizable chain having pendant groups to which may be bound to a chelating group for binding the ions. Examples of chelating groups that may be used according to the embodiments herein include, but are not limited to, ethylenediaminetetraacetic acid (EDTA), diethylenetriaminepentaacetic acid (DTPA), DOTA, NOTA, NOGADA, NETA, deferoxamine (DfO), porphyrins, polyamines, crown ethers, bis-thiosemicarbazones, polyoximes, and like groups. The chelate can be linked to the antigen binding construct by a group which allows formation of a bond to the molecule with minimal loss of immunoreactivity and minimal aggregation and/or internal cross-linking. The same chelates, when complexed with non-radioactive metals, such as manganese, iron and gadolinium are useful for MRI, when used along with the antigen binding constructs and carriers described herein. Macrocyclic chelates such as NOTA, NOGADA, DOTA, and TETA are of use with a variety of metals and radiometals including, but not limited to, radionuclides of gallium, yttrium and copper, respectively. Other ring-type chelates such as macrocyclic polyethers, which are of interest for stably binding radionuclides, such as Radium-223 for RAIT may be used. In certain embodiments, chelating moieties may be used to attach a PET imaging agent, such as an Aluminum-¹⁸F complex, to a targeting molecule for use in PET analysis.

[0567] Exemplary contrast agents that can be used as detectable moieties in accordance with the embodiments of the disclosure include, but are not limited to, barium, diatrizoate, ethiodized oil, gallium citrate, iocarmic acid, iocetamic acid, iodamide, iodipamide, iodoxamic acid, iogulamide, iohexyl, iopamidol, iopanoic acid, ioprocemic acid, iosefamic acid, ioseric acid, iosulamide meglumine, iosemetic acid, iotasul, iotetric acid, iothalamic acid, iotroxic acid, ioxaglic acid, ioxotrizoic acid, ipodate, meglumine, metrizamide, metrizoate, propyliodone, thallous chloride, or combinations thereof.

[0568] Bioluminescent and fluorescent compounds or molecules and dyes that can be used as detectable moieties in accordance with the embodiments of the disclosure include, but are not limited to, fluorescein, fluorescein isothiocyanate (FITC), OREGON GREEN™ rhodamine, Texas red, tetrarhodimine isothiocynate (TRITC), Cy3, Cy5, and the like), fluorescent markers (e.g., green fluorescent protein (GFP), phycoerythrin, and the like), autoquenched fluorescent compounds that are activated by tumor-associated proteases, enzymes (e.g., luciferase, horseradish peroxidase, alkaline phosphatase, and the like), nanoparticles, biotin, digoxigenin or combinations thereof.

[0569] Enzymes that can be used as detectable moieties in accordance with the embodiments of the disclosure include, but are not limited to, horseradish peroxidase, alkaline phosphatase, acid phosphatase, glucose oxidase, β-galactosidase, β-glucoronidase or β-lactamase. Such enzymes may be used in combination with a chromogen, a fluorogenic compound or a luminogenic compound to generate a detectable signal.

[0570] In some embodiments, the payload is a nanoparticle. The term “nanoparticle” refers to a microscopic particle whose size is measured in nanometers, e.g., a particle with at least one dimension less than about 100 nm. Nanoparticles can be used as detectable substances because they are small enough to scatter visible light rather than absorb it. For example, gold nanoparticles possess significant visible light extinction properties and appear deep red to black in solution. As a result, compositions comprising antigen binding constructs conjugated to nanoparticles can be used for the in vivo imaging of T-cells in a subject. At the small end of the size range, nanoparticles are often referred to as clusters. Metal, dielectric, and semiconductor nanoparticles have been formed, as well as hybrid structures (e.g. core-shell nanoparticles). Nanospheres, nanorods, and nanocups are just a few of the shapes that have been grown. Semiconductor quantum dots and nanocrystals are examples of additional types of nanoparticles. Such nanoscale particles can be used as payloads to be conjugated to any one of the anti-Gal3 antibodies disclosed herein.

[0571] In some embodiments, the payload comprises an immunomodulatory agent. Useful immunomodulatory agents include anti-hormones that block hormone action on tumors and immunosuppressive agents that suppress cytokine production, down-regulate self-antigen expression, or mask MHC antigens. Representative anti-hormones include anti-estrogens including, for example, tamoxifen, raloxifene, aromatase inhibiting 4(5)-imidazoles, 4-hydroxytamoxifen, trioxifene, keoxifene, LY 117018, onapnstone, and toremifene; and anti-androgens such as flutamide, nilutamide, bicalutamide, leuprolide, and goserelin; and anti-adrenal agents. Illustrative immunosuppressive agents include, but are not limited to 2-amino-6-aryl-5-substituted pyrimidines, azathioprine, cyclophosphamide, bromocryptine, danazol, dapsone, glutaraldehyde, anti-idiotypic antibodies for MHC antigens and MHC fragments, cyclosporin A, steroids such as glucocorticosteroids, streptokinase, or rapamycin.

[0572] In some embodiments, the payload comprises an immune modulator. Exemplary immune modulators include, but are not limited to, gancyclovier, etanercept, tacrolimus, sirolimus, voclosporin, cyclosporine, rapamycin, cyclophosphamide, azathioprine, mycophenolgate mofetil, methotrextrate, glucocorticoid and its analogs, xanthines, stem cell growth factors, lymphotoxins, hematopoietic factors, tumor necrosis factor (TNF) (e.g., TNFα), interleukins (e.g., interleukin-1 (IL-1), IL-2, IL-3, IL-6, IL-10, IL-12, IL-18, and IL-21), colony stimulating factors (e.g., granulocyte-colony stimulating factor (G-CSF) and granulocyte macrophage-colony stimulating factor (GM-CSF)), interferons (e.g., interferons-alpha, interferon-beta, interferon-gamma), the stem cell growth factor designated “S1 factor,” erythropoietin and thrombopoietin, or a combination thereof.

[0573] In some embodiments, the payload comprises an immunotoxin. Immunotoxins include, but are not limited to, ricin, radionuclides, pokeweed antiviral protein, Pseudomonas exotoxin A, diphtheria toxin, ricin A chain, fungal toxins such as restrictocin and phospholipase enzymes. See, generally, “Chimeric Toxins,” Olsnes and Pihl, Pharmac. Ther. 15:355-381 (1981); and “Monoclonal Antibodies for Cancer Detection and Therapy,” eds. Baldwin and Byers, pp. 159-179, 224-266, Academic Press (1985).

[0574] In some instances, the payload comprises a nucleic acid polymer. In such instances, the nucleic acid polymer comprises short interfering nucleic acid (siNA), short interfering RNA (siRNA), double-stranded RNA (dsRNA), micro-RNA (miRNA), short hairpin RNA (shRNA), an antisense oligonucleotide. In other instances, the nucleic acid polymer comprises an mRNA, encoding, e.g., a cytotoxic protein or peptide or an apoptotic triggering protein or peptide. Exemplary cytotoxic proteins or peptides include a bacterial cytotoxin such as an alpha-pore forming toxin (e.g., cytolysin A from E. coli), a beta-pore-forming toxin (e.g., α-Hemolysin, PVL—panton Valentine leukocidin, aerolysin, clostridial Epsilon-toxin, Clostridium perfringens enterotoxin), binary toxins (anthrax toxin, edema toxin, C. botulinum C2 toxin, C spirofome toxin, C. perfringens iota toxin, C. difficile cyto-lethal toxins (A and B)), prion, parasporin, a cholesterol-dependent cytolysins (e.g., pneumolysin), a small pore-forming toxin (e.g., Gramicidin A), a cyanotoxin (e.g., microcystins, nodularins), a hemotoxin, a neurotoxin (e.g., botulinum neurotoxin), a cytotoxin, cholera toxin, diphtheria toxin, Pseudomonas exotoxin A, tetanus toxin, or an immunotoxin (idarubicin, ricin A, CRM9, Pokeweed antiviral protein, DT). Exemplary apoptotic triggering proteins or peptides include apoptotic protease activating factor-1 (Apaf-1), cytochrome-c, caspase initiator proteins (CASP2, CASP8, CASP9, CASP10), apoptosis inducing factor (AIF), p53, p73, p63, Bcl-2, Bax, granzyme B, poly-ADP ribose polymerase (PARP), and P 21-activated kinase 2 (PAK2). In additional instances, the nucleic acid polymer comprises a nucleic acid decoy. In some instances, the nucleic acid decoy is a mimic of protein-binding nucleic acids such as RNA-based protein-binding mimics. Exemplary nucleic acid decoys include transactivating region (TAR) decoy and Rev response element (RRE) decoy.

[0575] In some cases, the payload is an aptamer. Aptamers are small oligonucleotide or peptide molecules that bind to specific target molecules. Exemplary nucleic acid aptamers include DNA aptamers, RNA aptamers, or XNA aptamers which are RNA and/or DNA aptamers comprising one or more unnatural nucleotides. Exemplary nucleic acid aptamers include ARC19499 (Archemix Corp.), REG1 (Regado Biosciences), and ARC1905 (Ophthotech).

[0576] Nucleic acids in accordance with the embodiments described herein optionally include naturally occurring nucleic acids, or one or more nucleotide analogs or have a structure that otherwise differs from that of a naturally occurring nucleic acid. For example, 2′-modifications include halo, alkoxy, and allyloxy groups. In some embodiments, the 2′—OH group is replaced by a group selected from H, OR, R, halo, SH, SR, NH₂, NHR, NR₂ or CN, wherein R is C₁-C₆ alkyl, alkenyl, or alkynyl, and halo is F, Cl, Br, or I. Examples of modified linkages include phosphorothioate and 5′-N-phosphoramidite linkages.

[0577] Nucleic acids having a variety of different nucleotide analogs, modified backbones, or non-naturally occurring internucleoside linkages are utilized in accordance with the embodiments described herein. In some cases, nucleic acids include natural nucleosides (i.e., adenosine, thymidine, guanosine, cytidine, uridine, deoxyadenosine, deoxythymidine, deoxyguanosine, and deoxycytidine) or modified nucleosides. Examples of modified nucleotides include base modified nucleoside (e.g., aracytidine, inosine, isoguanosine, nebularine, pseudouridine, 2,6-diaminopurine, 2-aminopurine, 2-thiothymidine, 3-deaza-5-azacytidine, 2′-deoxyuridine, 3-nitorpyrrole, 4-methylindole, 4-thiouridine, 4-thiothymidine, 2-aminoadenosine, 2-thiothymidine, 2-thiouridine, 5-bromocytidine, 5-iodouridine, inosine, 6-azauridine, 6-chloropurine, 7-deazaadenosine, 7-deazaguanosine, 8-azaadenosine, 8-azidoadenosine, benzimidazole, M1-methyladenosine, pyrrolo-pyrimidine, 2-amino-6-chloropurine, 3-methyl adenosine, 5-propynylcytidine, 5-propynyluridine, 5-bromouridine, 5-fluorouridine, 5-methylcytidine, 7-deazaadenosine, 7-deazaguanosine, 8-oxoadenosine, 8-oxoguanosine, O(6)-methylguanine, and 2-thiocytidine), chemically or biologically modified bases (e.g., methylated bases), modified sugars (e.g., 2′-fluororibose, 2′-aminoribose, 2′-azidoribose, 2′-O-methylribose, L-enantiomeric nucleosides arabinose, and hexose), modified phosphate groups (e.g., phosphorothioates and 5′-N-phosphoramidite linkages), and combinations thereof. Natural and modified nucleotide monomers for the chemical synthesis of nucleic acids are readily available. In some cases, nucleic acids comprising such modifications display enhanced properties relative to nucleic acids consisting only of naturally occurring nucleotides. In some embodiments, nucleic acid modifications described herein are utilized to reduce and/or prevent digestion by nucleases (e.g. exonucleases, endonucleases, etc.). For example, the structure of a nucleic acid may be stabilized by including nucleotide analogs at the 3′ end of one or both strands order to reduce digestion.

[0578] Different nucleotide modifications and/or backbone structures may exist at various positions in the nucleic acid. Such modifications include morpholinos, peptide nucleic acids (PNAs), methylphosphonate nucleotides, thiolphosphonate nucleotides, 2′-fluoro N3-P5′-phosphoramidites, 1′, 5′-anhydrohexitol nucleic acids (HNAs), or a combination thereof.

[0579] Any of the anti-Gal3 antibodies disclosed herein may be conjugated to one or more (e.g. 1, 2, 3, 4, 5, 6, 7, 8, 9, or 10, or more) payloads described herein.

### Conjugation Chemistry

[0580] In some instances, the payload is conjugated to an anti-Gal3 antibody described herein by a native ligation. In some instances, the conjugation is as described in: Dawson, et al. “Synthesis of proteins by native chemical ligation,” Science 1994, 266, 776-779; Dawson, et al. “Modulation of Reactivity in Native Chemical Ligation through the Use of Thiol Additives,” J. Am. Chem. Soc. 1997, 119, 4325-4329; Hackeng, et al. “Protein synthesis by native chemical ligation: Expanded scope by using straightforward methodology,” Proc. Natl. Acad. Sci. USA 1999, 96, 10068-10073; or Wu, et al. “Building complex glycopeptides: Development of a cysteine-free native chemical ligation protocol,” Angew. Chem. Int. Ed. 2006, 45, 4116-4125. In some instances, the conjugation is as described in U.S. Pat. No. 8,936,910.

[0581] In some instances, the payload is conjugated to an anti-Gal3 antibody described herein by a site-directed method utilizing a “traceless” coupling technology (Philochem). In some instances, the “traceless” coupling technology utilizes an N-terminal 1,2-aminothiol group on the binding moiety which is then conjugate with a polynucleic acid molecule containing an aldehyde group. (see Casi et al., “Site-specific traceless coupling of potent cytotoxic drugs to recombinant antibodies for pharmacodelivery,” JACS 134(13): 5887-5892 (2012))

[0582] In some instances, the payload is conjugated to an anti-Gal3 antibody described herein by a site-directed method utilizing an unnatural amino acid incorporated into the binding moiety. In some instances, the unnatural amino acid comprises p-acetylphenylalanine (pAcPhe). In some instances, the keto group of pAcPhe is selectively coupled to an alkoxy-amine derivatived conjugating moiety to form an oxime bond. (see Axup et al., “Synthesis of site-specific antibody-drug conjugates using unnatural amino acids,” PNAS 109(40): 16101-16106 (2012)).

[0583] In some instances, the payload is conjugated to an anti-Gal3 antibody described herein by a site-directed method utilizing an enzyme-catalyzed process. In some instances, the site-directed method utilizes SMARTag™ technology (Redwood). In some instances, the SMARTag™ technology comprises generation of a formylglycine (FGly) residue from cysteine by formylglycine-generating enzyme (FGE) through an oxidation process under the presence of an aldehyde tag and the subsequent conjugation of FGly to an alkylhydraine-functionalized polynucleic acid molecule via hydrazino-Pictet-Spengler (HIPS) ligation. (see Wu et al., “Site-specific chemical modification of recombinant proteins produced in mammalian cells by using the genetically encoded aldehyde tag,” PNAS 106(9): 3000-3005 (2009); Agarwal, et al., “A Pictet-Spengler ligation for protein chemical modification,” PNAS 110(1): 46-51 (2013)).

[0584] In some instances, the enzyme-catalyzed process comprises microbial transglutaminase (mTG). In some cases, the payload is conjugated to the anti-Gal3 antibody utilizing a microbial transglutamine catalyzed process. In some instances, mTG catalyzes the formation of a covalent bond between the amide side chain of a glutamine within the recognition sequence and a primary amine of a functionalized polynucleic acid molecule. In some instances, mTG is produced from Streptomyces mobarensis. (see Strop et al., “Location matters: site of conjugation modulates stability and pharmacokinetics of antibody drug conjugates,” Chemistry and Biology 20(2) 161-167 (2013)).

[0585] In some instances, the payload is conjugated to an anti-Gal3 antibody by a method as described in PCT Publication No. WO2014/140317, which utilizes a sequence-specific transpeptidase and is hereby expressly incorporated by reference in its entirety.

[0586] In some instances, the payload is conjugated to an anti-Gal3 antibody described herein by a method as described in U.S. Patent Publication Nos. 2015/0105539 and 2015/0105540.

### Linker

[0587] In some instances, a linker described herein comprises a natural or synthetic polymer, consisting of long chains of branched or unbranched monomers, and/or cross-linked network of monomers in two or three dimensions. In some instances, the linker includes a polysaccharide, lignin, rubber, or polyalkylen oxide (e.g., polyethylene glycol).

[0588] In some instances, the linker includes, but is not limited to, alpha-, omega-dihydroxylpolyethyleneglycol, biodegradable lactone-based polymer, e.g. polyacrylic acid, polylactide acid (PLA), poly(glycolic acid) (PGA), polypropylene, polystyrene, polyolefin, polyamide, polycyanoacrylate, polyimide, polyethylenterephthalat (PET, PETG), polyethylene terephthalate (PETE), polytetramethylene glycol (PTG), or polyurethane as well as mixtures thereof. As used herein, a mixture refers to the use of different polymers within the same compound as well as in reference to block copolymers. In some cases, block copolymers are polymers wherein at least one section of a polymer is built up from monomers of another polymer. In some instances, the linker comprises polyalkylene oxide. In some instances, the linker comprises PEG. In some instances, the linker comprises polyethylene imide (PEI) or hydroxy ethyl starch (HES).

[0589] In some cases, the polyalkylene oxide (e.g., PEG) is a polydisperse or monodisperse compound. In some instances, polydisperse material comprises disperse distribution of different molecular weight of the material, characterized by mean weight (weight average) size and dispersity. In some instances, the monodisperse PEG comprises one size of molecules. In some embodiments, the linker is poly- or monodispersed polyalkylene oxide (e.g., PEG) and the indicated molecular weight represents an average of the molecular weight of the polyalkylene oxide, e.g., PEG, molecules.

[0590] In some embodiments, the linker comprises a polyalkylene oxide (e.g., PEG) and the molecular weight of the polyalkylene oxide (e.g., PEG) is about 200, 300, 400, 500, 600, 700, 800, 900, 1000, 1100, 1200, 1300, 1400, 1450, 1500, 1600, 1700, 1800, 1900, 2000, 2100, 2200, 2300, 2400, 2500, 2600, 2700, 2800, 2900, 3000, 3250, 3350, 3500, 3750, 4000, 4250, 4500, 4600, 4750, 5000, 5500, 6000, 6500, 7000, 7500, 8000, 10,000, 12,000, 20,000, 35,000, 40,000, 50,000, 60,000, or 100,000 Da.

[0591] In some embodiments, the polyalkylene oxide (e.g., PEG) is a discrete PEG, in which the discrete PEG is a polymeric PEG comprising more than one repeating ethylene oxide units. In some instances, a discrete PEG (dPEG) comprises from 2 to 60, from 2 to 50, or from 2 to 48 repeating ethylene oxide units. In some instances, a dPEG comprises about 2, 3, 4, 5, 6, 7, 8, 9, 10, 11, 12, 13, 14, 15, 16, 17, 18, 19, 20, 22, 24, 26, 28, 30, 35, 40, 42, 48, 50 or more repeating ethylene oxide units. In some instances, a dPEG comprises about 2 or more repeating ethylene oxide units. In some cases, a dPEG is synthesized as a single molecular weight compound from pure (e.g., about 95%, 98%, 99%, or 99.5%) staring material in a step-wise fashion. In some cases, a dPEG has a specific molecular weight, rather than an average molecular weight.

[0592] In some instances, the linker is a discrete PEG, optionally comprising from 2 to 60, from 2 to 50, or from 2 to 48 repeating ethylene oxide units. In some cases, the linker comprises a dPEG comprising about 2, 3, 4, 5, 6, 7, 8, 9, 10, 11, 12, 13, 14, 15, 16, 17, 18, 19, 20, 22, 24, 26, 28, 30, 35, 40, 42, 48, 50 or more repeating ethylene oxide units.

[0593] In some embodiments, the linker is a polypeptide linker. In some instances, the polypeptide linker comprises at least 2, 3, 4, 5, 6, 7, 8, 10, 15, 20, 25, 30, 35, 40, 45, 50, 60, 70, 80, 90, 100, or more amino acid residues. In some instances, the polypeptide linker comprises at least 2, 3, 4, 5, 6, 7, 8, or more amino acid residues. In some instances, the polypeptide linker comprises at most 2, 3, 4, 5, 6, 7, 8, or less amino acid residues. In some cases, the polypeptide linker is a cleavable polypeptide linker (e.g., either enzymatically or chemically). In some cases, the polypeptide linker is a non-cleavable polypeptide linker. In some instances, the polypeptide linker comprises Val-Cit (valine-citrulline), Gly-Gly-Phe-Gly, Phe-Lys, Val-Lys, Gly-Phe-Lys, Phe-Phe-Lys, Ala-Lys, Val-Arg, Phe-Cit, Phe-Arg, Leu-Cit, Ile-Cit, Trp-Cit, Phe-Ala, Ala-Leu-Ala-Leu, or Gly-Phe-Leu-Gly. In some instances, the polypeptide linker comprises a peptide such as: Val-Cit (valine-citrulline), Gly-Gly-Phe-Gly, Phe-Lys, Val-Lys, Gly-Phe-Lys, Phe-Phe-Lys, Ala-Lys, Val-Arg, Phe-Cit, Phe-Arg, Leu-Cit, Ile-Cit, Trp-Cit, Phe-Ala, Ala-Leu-Ala-Leu, or Gly-Phe-Leu-Gly. In some cases, the polypeptide linker comprises L-amino acids, D-amino acids, or a mixture of both L- and D-amino acids.

[0594] In some instances, the linker comprises a homobifuctional linker. Exemplary homobifuctional linkers include, but are not limited to, Lomant's reagent dithiobis (succinimidylpropionate) DSP, 3′3′-dithiobis(sulfosuccinimidyl proprionate (DTSSP), disuccinimidyl suberate (DSS), bis(sulfosuccinimidyl)suberate (BS), disuccinimidyl tartrate (DST), disulfosuccinimidyl tartrate (sulfo DST), ethylene glycobis(succinimidylsuccinate) (EGS), disuccinimidyl glutarate (DSG), N,N′-disuccinimidyl carbonate (DSC), dimethyl adipimidate (DMA), dimethyl pimelimidate (DMP), dimethyl suberimidate (DMS), dimethyl-3,3′-dithiobispropionimidate (DTBP), 1,4-di-3′-(2′-pyridyldithio)propionamido)butane (DPDPB), bismaleimidohexane (BMH), aryl halide-containing compound (DFDNB), such as e.g. 1,5-difluoro-2,4-dinitrobenzene or 1,3-difluoro-4,6-dinitrobenzene, 4,4′-difluoro-3,3′-dinitrophenylsulfone (DFDNPS), bis-[β-(4-azidosalicylamido)ethyl]disulfide (BASED), formaldehyde, glutaraldehyde, 1,4-butanediol diglycidyl ether, adipic acid dihydrazide, carbohydrazide, o-toluidine, 3,3′-dimethylbenzidine, benzidine, α,α′-p-diaminodiphenyl, diiodo-p-xylene sulfonic acid, N,N′-ethylene-bis(iodoacetamide), or N,N′-hexamethylene-bis(iodoacetamide).

[0595] In some embodiments, the linker comprises a heterobifunctional linker. Exemplary heterobifunctional linker include, but are not limited to, amine-reactive and sulfhydryl cross-linkers such as N-succinimidyl 3-(2-pyridyldithio)propionate (sPDP), long-chain N-succinimidyl 3-(2-pyridyldithio)propionate (LC-sPDP), water-soluble-long-chain N-succinimidyl 3-(2-pyridyldithio) propionate (sulfo-LC-sPDP), succinimidyloxycarbonyl-α-methyl-α-(2-pyridyldithio)toluene (sMPT), sulfosuccinimidyl-6-[α-methyl-α-(2-pyridyldithio)toluamido]hexanoate (sulfo-LC-sMPT), succinimidyl-4-(N-maleimidomethyl)cyclohexane-1-carboxylate (sMCC), sulfosuccinimidyl-4-(N-maleimidomethyl)cyclohexane-1-carboxylate (sulfo-sMCC), m-maleimidobenzoyl-N-hydroxysuccinimide ester (MBs), m-maleimidobenzoyl-N-hydroxysulfosuccinimide ester (sulfo-MBs), N-succinimidyl(4-iodoacteyl)aminobenzoate (sIAB), sulfosuccinimidyl(4-iodoacteyl)aminobenzoate (sulfo-sIAB), succinimidyl-4-(p-maleimidophenyl)butyrate (sMPB), sulfosuccinimidyl-4-(p-maleimidophenyl)butyrate (sulfo-sMPB), N-(γ-maleimidobutyryloxy)succinimide ester (GMBs), N-(γ-maleimidobutyryloxy)sulfosuccinimide ester (sulfo-GMBs), succinimidyl 6-((iodoacetyl)amino)hexanoate (sIAX), succinimidyl 6-[6-(((iodoacetyl)amino)hexanoyl)amino]hexanoate (sIAXX), succinimidyl 4-(((iodoacetyl)amino)methyl)cyclohexane-1-carboxylate (sIAC), succinimidyl 6-((((4-iodoacetyl)amino)methyl)cyclohexane-1-carbonyl)amino) hexanoate (sIACX), p-nitrophenyl iodoacetate (NPIA), carbonyl-reactive and sulfhydryl-reactive cross-linkers such as 4-(4-N-maleimidophenyl)butyric acid hydrazide (MPBH), 4-(N-maleimidomethyl)cyclohexane-1-carboxyl-hydrazide-8 (M₂C₂H), 3-(2-pyridyldithio)propionyl hydrazide (PDPH), amine-reactive and photoreactive cross-linkers such as N-hydroxysuccinimidyl-4-azidosalicylic acid (NHs-AsA), N-hydroxysulfosuccinimidyl-4-azidosalicylic acid (sulfo-NHs-AsA), sulfosuccinimidyl-(4-azidosalicylamido)hexanoate (sulfo-NHs-LC-AsA), sulfosuccinimidyl-2-(p-azidosalicylamido)ethyl-1,3′-dithiopropionate (sAsD), N-hydroxysuccinimidyl-4-azidobenzoate (HsAB), N-hydroxysulfosuccinimidyl-4-azidobenzoate (sulfo-HsAB), N-succinimidyl-6-(4′-azido-2′-nitrophenylamino)hexanoate (sANPAH), sulfosuccinimidyl-6-(4′-azido-2′-nitrophenylamino)hexanoate (sulfo-sANPAH), N-5-azido-2-nitrobenzoyloxysuccinimide (ANB-NOs), sulfosuccinimidyl-2-(m-azido-o-nitrobenzamido)-ethyl-1,3′-dithiopropionate (sAND), N-succinimidyl-4(4-azidophenyl)1,3′-dithiopropionate (sADP), N-sulfosuccinimidyl(4-azidophenyl)-1,3′-dithiopropionate (sulfo-sADP), sulfosuccinimidyl 4-(ρ-azidophenyl)butyrate (sulfo-sAPB), sulfosuccinimidyl 2-(7-azido-4-methylcoumarin-3-acetamide)ethyl-1,3′-dithiopropionate (sAED), sulfosuccinimidyl 7-azido-4-methylcoumain-3-acetate (sulfo-sAMCA), ρ-nitrophenyl diazopyruvate (ρNPDP), ρ-nitrophenyl-2-diazo-3,3,3-trifluoropropionate (PNP-DTP), sulfhydryl-reactive and photoreactive cross-linkers such as1-(ρ-Azidosalicylamido)-4-(iodoacetamido)butane (AsIB), N-[4-(ρ-azidosalicylamido)butyl]-3′-(2′-pyridyldithio)propionamide (APDP), benzophenone-4-iodoacetamide, benzophenone-4-maleimide carbonyl-reactive and photoreactive cross-linkers such as ρ-azidobenzoyl hydrazide (ABH), carboxylate-reactive and photoreactive cross-linkers such as 4-(ρ-azidosalicylamido)butylamine (AsBA), and arginine-reactive and photoreactive cross-linkers such as ρ-azidophenyl glyoxal (APG).

[0596] In some embodiments, the linker comprises a benzoic acid group, or its derivatives thereof. In some instances, the benzoic acid group or its derivatives thereof comprise paraaminobenzoic acid (PABA). In some instances, the benzoic acid group or its derivatives thereof comprise gamma-aminobutyric acid (GABA).

[0597] In some embodiments, the linker comprises one or more of a maleimide group, a peptide moiety, and/or a benzoic acid group, in any combination. In some embodiments, the linker comprises a combination of a maleimide group, a peptide moiety, and/or a benzoic acid group. In some instances, the maleimide group is maleimidocaproyl (me). In some instances, the peptide group is val-cit. In some instances, the benzoic acid group is PABA. In some instances, the linker comprises a mc-val-cit group. In some cases, the linker comprises a val-cit-PABA group. In additional cases, the linker comprises a mc-val-cit-PABA group.

[0598] In some embodiments, the linker is a self-immolative linker or a self-elimination linker. In some cases, the linker is a self-immolative linker. In other cases, the linker is a self-elimination linker (e.g., a cyclization self-elimination linker). In some instances, the linker comprises a linker described in U.S. Pat. No. 9,089,614 or PCT Publication No. WO2015038426.

[0599] In some embodiments, the linker is a dendritic type linker. In some instances, the dendritic type linker comprises a branching, multifunctional linker moiety. In some instances, the dendritic type linker comprises PAMAM dendrimers.

[0600] In some embodiments, the linker is a traceless linker or a linker in which after cleavage does not leave behind a linker moiety (e.g., an atom or a linker group) to the antibody or payload. Exemplary traceless linkers include, but are not limited to, germanium linkers, silicium linkers, sulfur linkers, selenium linkers, nitrogen linkers, phosphorus linkers, boron linkers, chromium linkers, or phenylhydrazide linker. In some cases, the linker is a traceless aryl-triazene linker as described in Hejesen, et al., “A traceless aryl-triazene linker for DNA-directed chemistry,” Org Biomol Chem 11(15): 2493-2497 (2013). In some instances, the linker is a traceless linker described in Blaney, et al., “Traceless solid-phase organic synthesis,” Chem. Rev. 102: 2607-2024 (2002). In some instances, a linker is a traceless linker as described in U.S. Pat. No. 6,821,783.

### Kit/Article of Manufacture

[0601] Disclosed herein, in certain embodiments, are kits and articles of manufacture for use with one or more of the compositions and methods described herein. Such kits include a carrier, package, or container that is compartmentalized to receive one or more containers such as vials, tubes, and the like, each of the container(s) comprising one of the separate elements to be used in a method described herein. Suitable containers include, for example, bottles, vials, syringes, and test tubes. In one embodiment, the containers are formed from a variety of materials such as glass or plastic.

[0602] The articles of manufacture provided herein contain packaging materials. Examples of pharmaceutical packaging materials include, but are not limited to, blister packs, bottles, tubes, bags, containers, bottles, and any packaging material suitable for a selected formulation and intended mode of administration and treatment.

[0603] For example, the container(s) include an anti-Gal3 antibody as disclosed herein, host cells for producing one or more antibodies described herein, and/or vectors comprising nucleic acid molecules that encode the antibodies described herein. Such kits optionally include an identifying description or label or instructions relating to its use in the methods described herein.

[0604] A kit typically includes labels listing contents and/or instructions for use, and package inserts with instructions for use. A set of instructions will also typically be included.

[0605] In one embodiment, a label is on or associated with the container. In one embodiment, a label is on a container when letters, numbers or other characters forming the label are attached, molded or etched into the container itself; a label is associated with a container when it is present within a receptacle or carrier that also holds the container, e.g., as a package insert. In one embodiment, a label is used to indicate that the contents are to be used for a specific therapeutic application. The label also indicates directions for use of the contents, such as in the methods described herein.

[0606] In certain embodiments, the pharmaceutical compositions are presented in a pack or dispenser device which contains one or more unit dosage forms containing a compound provided herein. The pack, for example, contains metal or plastic foil, such as a blister pack. In one embodiment, the pack or dispenser device is accompanied by instructions for administration. In one embodiment, the pack or dispenser is also accompanied with a notice associated with the container in form prescribed by a governmental agency regulating the manufacture, use, or sale of pharmaceuticals, which notice is reflective of approval by the agency of the form of the drug for human or veterinary administration. Such notice, for example, is the labeling approved by the U.S. Food and Drug Administration for prescription drugs, or the approved product insert. In one embodiment, compositions containing a compound provided herein formulated in a compatible pharmaceutical carrier are also prepared, placed in an appropriate container, and labeled for treatment of an indicated condition.

[0607] Some embodiments provided herein are described by way of the following provided numbered arrangements A and also provided as possible combinations or overlapping embodiments:

[0608] 1. A method of inhibiting Gal3-mediated amyloid aggregation of a protein, comprising:
[0609] contacting the protein with an anti-Gal3 antibody or binding fragment thereof,
[0610] wherein binding of the anti-Gal3 antibody or binding fragment thereof to Gal3 inhibits Gal3-mediated amyloid aggregation of the protein.

[0611] 2. The method of arrangement 1, wherein the protein is in a cell.

[0612] 3. The method of arrangement 1 or 2, wherein the method is performed in vitro or in vivo.

[0613] 4. The method of any one of arrangements 1-3, wherein Gal3-mediated amyloid aggregation of the protein is inhibited by at least 5%, 10%, 15%, 20%, 25%, 30%, 35%, 40%, 45%, 50%, 55%, 60%, 65%, 70%, 75%, 80%, 85%, 90%, 95%, or 99% after contacting with the anti-Gal3 antibody or binding fragment thereof relative to a cell that is not contacted with the anti-Gal3 antibody or binding fragment thereof.

[0614] 5. The method of any one of arrangements 1-4, wherein the protein comprises α-synuclein, tau protein, TAR DNA-binding protein 43 (TDP-43), transthyretin (TTR), uromodulin, islet amyloid polypeptide (IAPP), serum amyloid A (SAA), or p53, or any combination thereof.

[0615] 6. The method of arrangement 5, wherein the tau protein is 4R tau and/or phosphorylated tau (phospho tau), optionally wherein the phosphorylated tau is phospho-tau (S396).

[0616] 7. The method of any one of arrangements 1-6, wherein the protein comprises apolipoprotein E (APOE), prion protein, or neurofilament light (NFL), or any combination thereof, optionally wherein the apolipoprotein E is APO-E4.

[0617] 8. A method of treating an amyloid proteopathy in a subject in need thereof, comprising:
[0618] administering to the subject an anti-Gal3 antibody or binding fragment thereof,
[0619] wherein binding of the anti-Gal3 antibody or binding fragment thereof to Gal3 in the subject inhibits Gal3-mediated amyloid aggregation of a protein in the subject, thereby treating the amyloid proteopathy in the subject.

[0620] 9. The method of arrangement 8, further comprising identifying the subject as needing treatment of the amyloid proteopathy prior to the administering step.

[0621] 10. The method of arrangement 8 or 9, further comprising detecting an improvement in the amyloid proteopathy in the subject following the administering step.

[0622] 11. The method of arrangement 9 or 10, wherein identifying the subject as needing treatment of the amyloid proteopathy and/or detecting the improvement in the amyloid proteopathy is done by biopsy, blood or urine test, echocardiogram, or technetium pyrophosphate (99mTc-PYP) scintigraphy.

[0623] 12. The method of any one of arrangements 8-11, wherein the amyloid proteopathy is reduced by at least 5%, 10%, 15%, 20%, 25%, 30%, 35%, 40%, 45%, 50%, 55%, 60%, 65%, 70%, 75%, 80%, 85%, 90%, 95%, or 99% after the administering step relative to the amyloid proteopathy prior to the administering step.

[0624] 13. The method of any one of arrangements 8-12, wherein the protein comprises α-synuclein, tau protein, TAR DNA-binding protein 43 (TDP-43), transthyretin (TTR), uromodulin, islet amyloid polypeptide (IAPP), serum amyloid A (SAA), or p53, or any combination thereof.

[0625] 14. The method of arrangement 13, wherein the tau protein is 4R tau and/or phosphorylated tau (phospho tau), optionally wherein the phosphorylated tau is phospho-tau (S396).

[0626] 15. The method of any one of arrangement 8-14, wherein the protein comprises apolipoprotein E (APOE), prion protein, or neurofilament light (NFL), or any combination thereof, optionally wherein the apolipoprotein E is APO-E4.

[0627] 16. The method of any one of arrangement 8-15, wherein the amyloid proteopathy comprises a synucleinopathy, Parkinson's disease, dementia with Lewy bodies, multiple system atrophy, tauopathy, Alzheimer's disease, progressive supranuclear palsy, corticobasal degeneration, Pick's disease, TDP-43 proteopathy, amyotrophic lateral sclerosis, frontotemporal lobar degeneration, TTR amyloidosis (ATTR), cardiac amyloidosis, uromodulin-associated kidney disease, IAPP amyloidosis, SAA amyloidosis, rheumatoid arthritis, inflammatory arthritis, spondyloarthropathies, juvenile idiopathic arthritis, ankylosing spondylitis, psoriatic arthritis, inflammatory bowel disease, ulcerative colitis, Crohn's disease, celiac disease, vasculitis, sarcoidosis, familial Mediterranean fever, tumor necrosis factor receptor-associated periodic syndrome (TRAPS), cancer, aging promoted by amyloid aggregation or any combination thereof.

[0628] 17. The method of any one of arrangements 1-16, wherein the anti-Gal3 antibody or binding fragment thereof comprises (1) a heavy chain variable region comprising a V_{H}-CDR1, a V_{H}-CDR2, and a V_{H}-CDR3; and (2) a light chain variable region comprising a V_{L}-CDR1, a V_{L}-CDR2, and a V_{L}-CDR3, wherein
[0629] the V_{H}-CDR1 comprises an amino acid sequence having at least 80%, 81%, 82%, 83%, 84%, 85%, 86%, 87%, 88%, 89%, 90%, 91%, 92%, 93%, 94%, 95%, 96%, 97%, 98%, 99%, or 100% identity to any one of the amino acid sequences of SEQ ID NOs: 27-70;
[0630] the V_{H}-CDR2 comprises an amino acid sequence having at least 80%, 81%, 82%, 83%, 84%, 85%, 86%, 87%, 88%, 89%, 90%, 91%, 92%, 93%, 94%, 95%, 96%, 97%, 98%, 99%, or 100% identity to any one of the amino acid sequences of SEQ ID NOs: 71-111, 801;
[0631] the V_{H}-CDR3 comprises an amino acid sequence having at least 80%, 81%, 82%, 83%, 84%, 85%, 86%, 87%, 88%, 89%, 90%, 91%, 92%, 93%, 94%, 95%, 96%, 97%, 98%, 99%, or 100% identity to any one of the amino acid sequences of SEQ ID NOs: 112-169, 802;
[0632] the V_{L}-CDR1 comprises an amino acid sequence having at least 80%, 81%, 82%, 83%, 84%, 85%, 86%, 87%, 88%, 89%, 90%, 91%, 92%, 93%, 94%, 95%, 96%, 97%, 98%, 99%, or 100% identity to any one of the amino acid sequences of SEQ ID NOs: 170-220;
[0633] the V_{L}-CDR2 comprises an amino acid sequence having at least 80%, 81%, 82%, 83%, 84%, 85%, 86%, 87%, 88%, 89%, 90%, 91%, 92%, 93%, 94%, 95%, 96%, 97%, 98%, 99%, or 100% identity to any one of the amino acid sequences of SEQ ID NOs: 221-247; and
[0634] the V_{L}-CDR3 comprises an amino acid sequence having at least 80%, 81%, 82%, 83%, 84%, 85%, 86%, 87%, 88%, 89%, 90%, 91%, 92%, 93%, 94%, 95%, 96%, 97%, 98%, 99%, or 100% identity to any one of the amino acid sequences of SEQ ID NOs: 248-296.

[0635] 18. The method of arrangement 17, wherein the anti-Gal3 antibody or binding fragment thereof comprises a combination of the V_{H}-CDR1, V_{H}-CDR2, V_{H}-CDR3, V_{L}-CDR1, VL-CDR2, and V_{L}-CDR3 as illustrated in FIG. 13.

[0636] 19. The method of arrangements 17 or 18, wherein the heavy chain variable region comprises a sequence having at least 80%, 81%, 82%, 83%, 84%, 85%, 86%, 87%, 88%, 89%, 90%, 91%, 92%, 93%, 94%, 95%, 96%, 97%, 98%, or 99% identity to the sequence selected from SEQ ID NOs: 297-373, 803, 806-820, 926.

[0637] 20. The method of any one of arrangements 17-19, wherein the light chain variable region comprises a sequence having at least 80%, 81%, 82%, 83%, 84%, 85%, 86%, 87%, 88%, 89%, 90%, 91%, 92%, 93%, 94%, 95%, 96%, 97%, 98%, or 99% identity to the sequence selected from SEQ ID NOs: 374-447, 821-835, 927-929.

[0638] 21. The method of any one of arrangements 1-20, wherein the anti-Gal3 antibody or binding fragment thereof comprises a heavy chain, wherein the heavy chain comprises a sequence having at least 80%, 81%, 82%, 83%, 84%, 85%, 86%, 87%, 88%, 89%, 90%, 91%, 92%, 93%, 94%, 95%, 96%, 97%, 98%, or 99% identity to the sequence selected from SEQ ID NOs: 448-494, 804, 836-850.

[0639] 22. The method of any one of arrangements 1-21, wherein the anti-Gal3 antibody or binding fragment thereof comprises a light chain, wherein the light chain comprises a sequence having at least 80%, 81%, 82%, 83%, 84%, 85%, 86%, 87%, 88%, 89%, 90%, 91%, 92%, 93%, 94%, 95%, 96%, 97%, 98%, or 99% identity to the sequence selected from SEQ ID NOs: 495-538, 805, 851-865.

[0640] 23. The method of any one of arrangements 1-22, wherein the anti-Gal3 antibody or binding fragment thereof is selected from the group consisting of: TB001, TB006, 12G5.D7, 13A12.2E5, 14H10.2C9, 15F10.2D6, 19B5.2E6, 20D11.2C6, 20H5.A3, 23H9.2E4, 2D10.2B2, 3B11.2G2, 7D8.2D8, mIMT001, 4A11.2B5, 4A11.H1L1, 4A11.H4L2, 4G2.2G6, 6B3.2D3, 6H6.2D6, 9H2.2H10, 13G4.2F8, 13H12.2F8, 15G7.2A7, 19D9.2E5, 23B10.2B12, 24D12.2H9, F846C.1B2, F846C.1F5, F846C.1H12, F846C.1H5, F846C.2H3, F846TC.14A2, F846TC.14E4, F846TC.16B5, F846TC.7F10, F847C.10B9, F847C.11B1, F847C.12F12, F847C.26F5, F847C.4B10, F849C.8D10, F849C.8H3, 846.2B11, 846.4D5, 846T.1H2, 847.14H4, 846.2D4, 846.2F11, 846T.10B1, 846T.2E3, 846T.4C9, 846T.4E11, 846T.4F5, 846T.8D1, 847.10C9, 847.11D6, 847.15D12, 847.15F9, 847.15H11, 847.20H7, 847.21B11, 847.27B9, 847.28D1, 847.2B8, 847.3B3, 849.1D2, 849.2D7, 849.2F12, 849.4B2, 849.4F12, 849.4F2, 849.5C2, 849.8D12, F847C.21H6, 849.5H1, 847.23F11, 847.16D10, 847.13E2-mH0mL1, 847.13E2-mH0mL2, 847.12C4, 847.4D3, 2D10-VH0-VL0, 2D10-hVH4-HVL1, 2D10-hVH4-HVL2, 2D10-hVH4-HVL3, 2D10-hVH4-HVL4, 2D10-hVH3-HVL1, 2D10-hVH3-HVL2, 2D10-hVH3-HVL3, 2D10-hVH3-HVL4, 20H5.A3-VH3VL1, 20H5.A3-VH3VL3, 20H5.A3-VH4VL1, 20H5.A3-VH5VL1, 20H5.A3-VH5VL3, 20H5.A3-VH6VL1, 20H5.A3-VH6VL3, or binding fragment thereof.

[0641] 24. A method of promoting amyloid aggregation and/or oligomerization of a protein, comprising contacting the protein with Gal3, wherein Gal3 promotes amyloid aggregation and/or oligomerization of the protein.

[0642] 25. The method of arrangement 24, wherein the protein is contacted with Gal3 in an aqueous solution.

[0643] 26. The method of arrangement 24 or 25, wherein Gal3 promotes amyloid aggregation and/or oligomerization of the protein on the order of 1, 2, 3, 4, 5, 6, 7, 8, 9, 10, 11, 12, 13, 14, 15, 16, 17, 18, 19, 20, 21, 22, 23, or 24 hours.

[0644] 27. The method of any one of arrangements 24-26, wherein the protein comprises α-synuclein, tau protein, TDP-43, TTR, uromodulin, IAPP, SAA, or p53, or any combination thereof.

[0645] 28. The method of arrangement 27, wherein the tau protein is 4R tau and/or phosphorylated tau (phospho tau), optionally wherein the phosphorylated tau is phospho-tau (S396), optionally wherein the phosphorylated tau forms trimers, tetramers, or higher order oligomers when contacted with Gal3.

[0646] 29. The method of arrangement 28, wherein amyloid aggregation and/or oligomerization of the tau protein is achieved more rapidly compared to spontaneous aggregation and/or oligomerization of tau protein alone, or aggregation and/or oligomerization of tau protein when mixed with heparin and/or arachnoid acid, optionally wherein tau protein is mixed with heparin and/or arachnoid acid at 37° C. or about 37° C.

[0647] 30. The method of arrangement 28 or 29, wherein amyloid aggregation and/or oligomerization of the tau protein is achieved with no more than 0.5, 1, 2, 3, 4, 5, 6, 7, 8, 9, 10, 11, 12, 13, 14, 15, 16, 17, 18, 19, 20, 21, 22, 23, or 24 hours of contacting the tau protein with Gal3.

[0648] 31. The method of any one of arrangements 24-30, wherein the protein comprises APOE, prion protein, or NFL, or any combination thereof, optionally wherein the APOE is APO-E4.

[0649] 32. The method of any one of arrangements 24-31, wherein the protein is contacted with Gal3 at room temperature.

[0650] 33. A composition comprising a protein and Gal3, wherein Gal3 promotes amyloid aggregation and/or oligomerization of the protein.

[0651] 34. The composition of arrangement 33, wherein the protein and Gal3 are in aqueous solution, or are dried and/or lyophilized.

[0652] 35. The composition of arrangement 33 or 34, wherein the protein comprises α-synuclein, tau protein, TDP-43, TTR, uromodulin, IAPP, SAA, or p53, or any combination thereof.

[0653] 36. The composition of arrangement 35, wherein the tau protein is 4R tau and/or phosphorylated tau (phospho tau), optionally wherein the phosphorylated tau is phospho-tau (5396), optionally wherein the phosphorylated tau forms trimers, tetramers, or higher order oligomers when contacted with Gal3.

[0654] 37. The composition of any one of arrangements 33-36, wherein the protein comprises APOE, prion protein, or NFL, or any combination thereof, optionally wherein the APOE is APO-E4

[0655] 38. A kit comprising the composition of any one of arrangements 33-37.

[0656] Some embodiments provided herein are described by way of the following provided numbered arrangements B and also provided as possible combinations or overlapping embodiments:

[0657] 1. A method of inhibiting Gal3-mediated amyloid aggregation of a protein, comprising:
[0658] contacting the protein with an anti-Gal3 antibody or binding fragment thereof,
[0659] wherein binding of the anti-Gal3 antibody or binding fragment thereof to Gal3 inhibits Gal3-mediated amyloid aggregation of the protein.

[0660] 2. A method of inhibiting Gal3-mediated oligomerization of a protein, comprising:
[0661] contacting the protein with an anti-Gal3 antibody or binding fragment thereof,
[0662] wherein binding of the anti-Gal3 antibody or binding fragment thereof to Gal3 inhibits Gal3-mediated oligomerization of the protein.

[0663] 3. The method of any one of the preceding arrangements, wherein the protein is in a cell.

[0664] 4. The method of any one of the preceding arrangements, wherein the method is performed in vitro or in vivo.

[0665] 5. The method of any one of the preceding arrangements, wherein Gal3-mediated amyloid aggregation or oligomerization of the protein is inhibited by at least 5%, 10%, 15%, 20%, 25%, 30%, 35%, 40%, 45%, 50%, 55%, 60%, 65%, 70%, 75%, 80%, 85%, 90%, 95%, or 99% after contacting with the anti-Gal3 antibody or binding fragment thereof relative to a cell that is not contacted with the anti-Gal3 antibody or binding fragment thereof.

[0666] 6. The method of any one of the preceding arrangements, wherein the protein comprises α-synuclein, tau protein, TDP-43, transthyretin, uromodulin, islet amyloid polypeptide (IAPP), serum amyloid A (SAA), p53, apolipoprotein E (APOE), APOE-4, prion protein, fibrin, or neurofilament light (NFL), CRP, SUMO, light chain, platelet-derived growth factor receptor (PDGFR), melanoma cell adhesion molecule (MCAM), complement proteins C3 and/or C9, lysozyme, insulin, native haemoglobin (Hb), glycosylated haemoglobin (HbAIC), phenylalanine (Phe), glutamine (Gln), cholesteryl (co-esteryl), cholesterol, neuroserpin, Crystallin AA and/or Crystallin AB, cystatin-C, or myostatin propeptide, and/or any combination thereof.

[0667] 7. A method of treating an amyloid proteopathy in a subject in need thereof, comprising:
[0668] administering to the subject an anti-Gal3 antibody or binding fragment thereof,
[0669] wherein binding of the anti-Gal3 antibody or binding fragment thereof to Gal3 in the subject inhibits Gal3-mediated amyloid aggregation of a protein in the subject, thereby treating the amyloid proteopathy in the subject.

[0670] 8. A method of treating a proteopathy in a subject in need thereof, comprising:
[0671] administering to the subject an anti-Gal3 antibody or binding fragment thereof,
[0672] wherein binding of the anti-Gal3 antibody or binding fragment thereof to Gal3 in the subject inhibits Gal3-mediated oligomerization of a protein in the subject, thereby treating the amyloid proteopathy in the subject.

[0673] 9. The method of any one of the preceding arrangements, further comprising identifying the subject as needing treatment of the proteopathy and/or amyloid proteopathy prior to the administering step.

[0674] 10. The method of any one of the preceding arrangements, further comprising detecting an improvement in the proteopathy and/or amyloid proteopathy in the subject following the administering step.

[0675] 11. The method of any one of the preceding arrangements, wherein identifying the subject as needing treatment of the proteopathy and/or amyloid proteopathy and/or detecting the improvement in the amyloid proteopathy is done by biopsy, blood or urine test, echocardiogram, or technetium pyrophosphate (99mTc-PYP) scintigraphy.

[0676] 12. The method of any one of the preceding arrangements, wherein the proteopathy and/or amyloid proteopathy is reduced by at least 5%, 10%, 15%, 20%, 25%, 30%, 35%, 40%, 45%, 50%, 55%, 60%, 65%, 70%, 75%, 80%, 85%, 90%, 95%, or 99% after the administering step relative to the amyloid proteopathy prior to the administering step.

[0677] 13. The method of any one of the preceding arrangements, wherein the protein comprises α-synuclein, tau protein, TDP-43, transthyretin, uromodulin, islet amyloid polypeptide (IAPP), serum amyloid A (SAA), p53, apolipoprotein E (APOE), APOE-4, prion protein, fibrin, or neurofilament light (NFL), CRP, SUMO, light chain, platelet-derived growth factor receptor (PDGFR), melanoma cell adhesion molecule (MCAM), complement proteins C3 and/or C9, lysozyme, insulin, native haemoglobin (Hb), glycosylated haemoglobin (HbAIC), phenylalanine (Phe), glutamine (Gln), cholesteryl (co-esteryl), cholesterol, neuroserpin, Crystallin AA and/or Crystallin AB, cystatin-C, or myostatin propeptide, and/or any combination thereof.

[0678] 14. The method of any one of the preceding arrangements, wherein the proteopathy and/or amyloid proteopathy comprises a synucleinopathy, Parkinson's disease, dementia with Lewy bodies, multiple system atrophy, tauopathy, Alzheimer's disease, progressive supranuclear palsy, corticobasal degeneration, Pick's disease, TDP-43 proteopathy, amyotrophic lateral sclerosis, frontotemporal lobar degeneration, TTR amyloidosis (ATTR), cardiac amyloidosis, uromodulin-associated kidney disease, IAPP amyloidosis, SAA amyloidosis, rheumatoid arthritis, inflammatory arthritis, spondyloarthropathies, juvenile idiopathic arthritis, ankylosing spondylitis, psoriatic arthritis, inflammatory bowel disease, ulcerative colitis, Crohn's disease, celiac disease, vasculitis, sarcoidosis, familial Mediterranean fever, tumor necrosis factor receptor-associated periodic syndrome (TRAPS), cancer, aging promoted by amyloid aggregation or any combination thereof.

[0679] 15. The method of any one of the preceding arrangements, wherein the anti-Gal3 antibody or binding fragment thereof comprises (1) a heavy chain variable region comprising a V_{H}-CDR1, a V_{H}-CDR2, and a V_{H}-CDR3; and (2) a light chain variable region comprising a V_{L}-CDR1, a V_{L}-CDR2, and a V_{L}-CDR3, wherein
[0680] the V_{H}-CDR1 comprises an amino acid sequence having at least 80%, 81%, 82%, 83%, 84%, 85%, 86%, 87%, 88%, 89%, 90%, 91%, 92%, 93%, 94%, 95%, 96%, 97%, 98%, 99%, or 100% identity to any one of the amino acid sequences of SEQ ID NOs: 27-70;
[0681] the V_{H}-CDR2 comprises an amino acid sequence having at least 80%, 81%, 82%, 83%, 84%, 85%, 86%, 87%, 88%, 89%, 90%, 91%, 92%, 93%, 94%, 95%, 96%, 97%, 98%, 99%, or 100% identity to any one of the amino acid sequences of SEQ ID NOs: 71-111, 801, 951, 952;
[0682] the V_{H}-CDR3 comprises an amino acid sequence having at least 80%, 81%, 82%, 83%, 84%, 85%, 86%, 87%, 88%, 89%, 90%, 91%, 92%, 93%, 94%, 95%, 96%, 97%, 98%, 99%, or 100% identity to any one of the amino acid sequences of SEQ ID NO: 112-169, 802, 953, 954;
[0683] the V_{L}-CDR1 comprises an amino acid sequence having at least 80%, 81%, 82%, 83%, 84%, 85%, 86%, 87%, 88%, 89%, 90%, 91%, 92%, 93%, 94%, 95%, 96%, 97%, 98%, 99%, or 100% identity to any one of the amino acid sequences of SEQ ID NOs: 170-220;
[0684] the V_{L}-CDR2 comprises an amino acid sequence having at least 80%, 81%, 82%, 83%, 84%, 85%, 86%, 87%, 88%, 89%, 90%, 91%, 92%, 93%, 94%, 95%, 96%, 97%, 98%, 99%, or 100% identity to any one of the amino acid sequences of SEQ ID NOs: 211-247; and
[0685] the V_{L}-CDR3 comprises an amino acid sequence having at least 80%, 81%, 82%, 83%, 84%, 85%, 86%, 87%, 88%, 89%, 90%, 91%, 92%, 93%, 94%, 95%, 96%, 97%, 98%, 99%, or 100% identity to any one of the amino acid sequences of SEQ ID NOs: 248-296; or wherein the antibody or binding fragment thereof comprises a blocking antibody that competes for binding with any one or more of the preceding anti-Gal3 antibodies or binding fragments thereof, wherein the blocking antibody is at least 80% effective at outcompeting the anti-Gal3 antibody or binding fragment thereof.

[0686] 16. The method of any one of the preceding arrangements, wherein the anti-Gal3 antibody or binding fragment thereof comprises a combination of the V_{H}-CDR1, V_{H}-CDR2, V_{H}-CDR3, V_{L}-CDR1, V_{L}-CDR2, and V_{L}-CDR3 as illustrated in FIG. 13; or wherein the antibody or binding fragment thereof comprises a blocking antibody that competes for binding with any one or more of the preceding anti-Gal3 antibodies or binding fragments thereof, wherein the blocking antibody is at least 80% effective at outcompeting the anti-Gal3 antibody or binding fragment thereof.

[0687] 17. The method of any one of the preceding arrangements, wherein the heavy chain variable region comprises a sequence having at least 80%, 81%, 82%, 83%, 84%, 85%, 86%, 87%, 88%, 89%, 90%, 91%, 92%, 93%, 94%, 95%, 96%, 97%, 98%, or 99% identity to the sequence selected from SEQ ID NOs: 297-373, 803, 806-820, 940, 955-968, 1067-1109, 1415-1439; or wherein the antibody or binding fragment thereof comprises a blocking antibody that competes for binding with any one or more of the preceding anti-Gal3 antibodies or binding fragments thereof, wherein the blocking antibody is at least 80% effective at outcompeting the anti-Gal3 antibody or binding fragment thereof.

[0688] 18. The method of any one of the preceding arrangements, wherein the light chain variable region comprises a sequence having at least 80%, 81%, 82%, 83%, 84%, 85%, 86%, 87%, 88%, 89%, 90%, 91%, 92%, 93%, 94%, 95%, 96%, 97%, 98%, or 99% identity to the sequence selected from SEQ ID NOs: 374-447, 821-835, 941-943, 969-982, 1110-1152, 1440-1464; or wherein the antibody or binding fragment thereof comprises a blocking antibody that competes for binding with any one or more of the preceding anti-Gal3 antibodies or binding fragments thereof, wherein the blocking antibody is at least 80% effective at outcompeting the anti-Gal3 antibody or binding fragment thereof.

[0689] 19. The method of any one of the preceding arrangements, wherein the anti-Gal3 antibody or binding fragment thereof comprises a heavy chain, wherein the heavy chain comprises a sequence having at least 80%, 81%, 82%, 83%, 84%, 85%, 86%, 87%, 88%, 89%, 90%, 91%, 92%, 93%, 94%, 95%, 96%, 97%, 98%, or 99% identity to the sequence selected from SEQ ID NOs: 448-494, 804, 836-850, 983-996, 1153-1195, 1411, 1465-1489; or wherein the antibody or binding fragment thereof comprises a blocking antibody that competes for binding with any one or more of the preceding anti-Gal3 antibodies or binding fragments thereof, wherein the blocking antibody is at least 80% effective at outcompeting the anti-Gal3 antibody or binding fragment thereof.

[0690] 20. The method of any one of the preceding arrangements, wherein the anti-Gal3 antibody or binding fragment thereof comprises a light chain, wherein the light chain comprises a sequence having at least 80%, 81%, 82%, 83%, 84%, 85%, 86%, 87%, 88%, 89%, 90%, 91%, 92%, 93%, 94%, 95%, 96%, 97%, 98%, or 99% identity to the sequence selected from SEQ ID NOs: 495-538, 805, 851-865, 997-1010, 1196-1238, 1412, 1490-1514; or wherein the antibody or binding fragment thereof comprises a blocking antibody that competes for binding with any one or more of the preceding anti-Gal3 antibodies or binding fragments thereof, wherein the blocking antibody is at least 80% effective at outcompeting the anti-Gal3 antibody or binding fragment thereof.

[0691] 21. The method of any one of the preceding arrangements, wherein the anti-Gal3 antibody or binding fragment thereof is selected from the group consisting of at least one of: TB001, TB006, 12G5.D7, 13A12.2E5, 14H10.2C9, 15F10.2D6, 19B5.2E6, 20D11.2C6, 20H5.A3, 23H9.2E4, 2D10.2B2, 3B11.2G2, 7D8.2D8, mIMT001, 4A11.2B5, 4A11.H1L1, 4A11.H4L2, 4G2.2G6, 6B3.2D3, 6H6.2D6, 9H2.2H10, 13G4.2F8, 13H12.2F8, 15G7.2A7, 19D9.2E5, 23B10.2B12, 24D12.2H9, F846C.1B2, F846C.1F5, F846C.1H12, F846C.1H5, F846C.2H3, F846TC.14A2, F846TC.14E4, F846TC.16B5, F846TC.7F10, F847C.10B9, F847C.11B1, F847C.12F12, F847C.26F5, F847C.4B10, F849C.8D10, F849C.8H3, 846.2B11, 846.4D5, 846T.1H2, 847.14H4, 846.2D4, 846.2F11, 846T.10B1, 846T.2E3, 846T.4C9, 846T.4E11, 846T.4F5, 846T.8D1, 847.10C9, 847.11D6, 847.15D12, 847.15F9, 847.15H11, 847.20H7, 847.21B11, 847.27B9, 847.28D1, 847.2B8, 847.3B3, 849.1D2, 849.2D7, 849.2F12, 849.4B2, 849.4F12, 849.4F2, 849.5C2, 849.8D12, F847C.21H6, 849.5H1, 847.23F11, 847.16D10, 847.13E2-mH0mL1, 847.13E2-mH0mL2, 847.12C4, 847.4D3, 2D10-VH0-VL0, 2D10-hVH4-HVL1, 2D10-hVH4-HVL2, 2D10-hVH4-HVL3, 2D10-hVH4-HVL4, 2D10-hVH3-HVL1, 2D10-hVH3-HVL2, 2D10-hVH3-HVL3, 2D10-hVH3-HVL4, 20H5.A3-VH3VL1, 20H5.A3-VH3VL3, 20H5.A3-VH4VL1, 20H5.A3-VH5VL1, 20H5.A3-VH5VL3, 20H5.A3-VH6VL1, 20H5.A3-VH6VL3, or binding fragment thereof; or wherein the antibody or binding fragment thereof comprises a blocking antibody that competes for binding with any one or more of the preceding anti-Gal3 antibodies or binding fragments thereof, wherein the blocking antibody is at least 80% effective at outcompeting the anti-Gal3 antibody or binding fragment thereof.

[0692] 22. The method of any one of the preceding arrangements, wherein the anti-Gal3 antibody or binding fragment thereof is selected from the group consisting of at least one of: 2D10-VH0-VL0, 2D10-hVH4-HVL1, 2D10-hVH4-HVL2, 2D10-hVH4-HVL3, 2D10-hVH4-HVL4, 2D10-hVH3-HVL1, 2D10-hVH3-HVL2, 2D10-hVH3-HVL3, 2D10-hVH3-HVL4, or binding fragment thereof; or wherein the antibody or binding fragment thereof comprises a blocking antibody that competes for binding with any one or more of the preceding anti-Gal3 antibodies or binding fragments thereof, wherein the blocking antibody is at least 80% effective at outcompeting the anti-Gal3 antibody or binding fragment thereof.

[0693] 23. The method of any one of the preceding arrangements, wherein the anti-Gal3 antibody or binding fragment thereof is selected from the group consisting of at least one of: 21H6-H0L0, 21H6-H1L1, 21H6-H1L2, 21H6-H1L3, 21H6-H1L4, 21H6-H2L1, 21H6-H2L2, 21H6-H2L3, 21H6-H2L4, 21H6-H3L1, 21H6-H3L2, 21H6-H3L3, 21H6-H3L4, 21H6-H4L1, 21H6-H4L2, 21H6-H4L3, 21H6-H4L4, 21H6-H5L1, 21H6-H5L2, 21H6-H5L3, 21H6-H5L4, 21H6-H6L1, 21H6-H6L2, 21H6-H6L3, 21H6-H6L4, or binding fragment thereof; or wherein the antibody or binding fragment thereof comprises a blocking antibody that competes for binding with any one or more of the preceding anti-Gal3 antibodies or binding fragments thereof, wherein the blocking antibody is at least 80% effective at outcompeting the anti-Gal3 antibody or binding fragment thereof.

[0694] 24. A method of promoting amyloid aggregation and/or oligomerization of a protein, comprising contacting the protein with Gal3, wherein Gal3 promotes amyloid aggregation and/or oligomerization of the protein.

[0695] 25. The method of any one of the preceding arrangements, wherein the protein is contacted with Gal3 in an aqueous solution.

[0696] 26. The method of any one of the preceding arrangements, wherein Gal3 promotes amyloid aggregation and/or oligomerization of the protein on the order of 1, 2, 3, 4, 5, 6, 7, 8, 9, 10, 11, 12, 13, 14, 15, 16, 17, 18, 19, 20, 21, 22, 23, or 24 hours.

[0697] 27. The method of any one of the preceding arrangements, wherein the protein comprises α-synuclein, tau protein, TDP-43, TTR, uromodulin, IAPP, SAA, or p53, or any combination thereof.

[0698] 28. The method of any one of the preceding arrangements, wherein the tau protein is 4R tau and/or phosphorylated tau (phospho tau), optionally wherein the phosphorylated tau is phospho-tau (S396), optionally wherein the phosphorylated tau forms trimers, tetramers, or higher order oligomers when contacted with Gal3.

[0699] 29. The method of any one of the preceding arrangements, wherein amyloid aggregation and/or oligomerization of the tau protein is achieved more rapidly compared to spontaneous aggregation and/or oligomerization of tau protein alone, or aggregation and/or oligomerization of tau protein when mixed with heparin and/or arachnoid acid, optionally wherein tau protein is mixed with heparin and/or arachnoid acid at 37° C. or about 37° C.

[0700] 30. The method of any one of the preceding arrangements, wherein amyloid aggregation and/or oligomerization of the tau protein is achieved with no more than 0.5, 1, 2, 3, 4, 5, 6, 7, 8, 9, 10, 11, 12, 13, 14, 15, 16, 17, 18, 19, 20, 21, 22, 23, or 24 hours of contacting the tau protein with Gal3.

[0701] 31. The method of any one of the preceding arrangements, wherein the protein comprises APOE, prion protein, or NFL, or any combination thereof, optionally wherein the APOE is APO-E4.

[0702] 32. The method of any one of the preceding arrangements, wherein the protein is contacted with Gal3 at room temperature.

[0703] 33. A composition comprising a protein and Gal3, wherein Gal3 promotes amyloid aggregation and/or oligomerization of the protein.

[0704] 34. The composition of any one of the preceding arrangements, wherein the protein and Gal3 are in aqueous solution, or are dried and/or lyophilized.

[0705] 35. The composition of any one of the preceding arrangements, wherein the protein comprises α-synuclein, tau protein, TDP-43, TTR, uromodulin, IAPP, SAA, or p53, or any combination thereof.

[0706] 36. The composition of any one of the preceding arrangements, wherein the tau protein is 4R tau and/or phosphorylated tau (phospho tau), optionally wherein the phosphorylated tau is phospho-tau (S396), optionally wherein the phosphorylated tau forms trimers, tetramers, or higher order oligomers when contacted with Gal3.

[0707] 37. The composition of any one of the preceding arrangements, wherein the protein comprises APOE, prion protein, or NFL, or any combination thereof, optionally wherein the APOE is APO-E4

[0708] 38. A kit comprising the composition of any one of any one of the preceding arrangements.

[0709] 39. A method of inhibiting Gal3-mediated amyloid aggregation of amyloid β40 and/or amyloid β42, comprising:
[0710] contacting the protein with an anti-Gal3 antibody or binding fragment thereof,
[0711] wherein binding of the anti-Gal3 antibody or binding fragment thereof to Gal3 inhibits Gal3-mediated amyloid aggregation of amyloid β40 and/or amyloid p42.

[0712] 40. A method of treating Alzheimer's disease in a subject in need thereof, comprising:
[0713] administering to the subject an anti-Gal3 antibody or binding fragment thereof,
[0714] wherein binding of the anti-Gal3 antibody or binding fragment thereof to Gal3 in the subject inhibits Gal3-mediated amyloid aggregation of amyloid β40 and/or amyloid p42 in the subject, thereby treating Alzheimer's disease in the subject.

[0715] 41. A method of treating CAA in a subject in need thereof, comprising:
[0716] administering to the subject an anti-Gal3 antibody or binding fragment thereof,
[0717] wherein binding of the anti-Gal3 antibody or binding fragment thereof to Gal3 in the subject inhibits Gal3-mediated aggregation of amyloid β40 and/or amyloid p42 in the subject, thereby treating CAA in the subject.

[0718] 42. A method of inhibiting Gal3-mediated amyloid aggregation of phospho tau, comprising:
[0719] contacting the protein with an anti-Gal3 antibody or binding fragment thereof,
[0720] wherein binding of the anti-Gal3 antibody or binding fragment thereof to Gal3 inhibits Gal3-mediated oligomerization of phospho tau.

[0721] 43. A method of treating Alzheimer's disease in a subject in need thereof, comprising:
[0722] administering to the subject an anti-Gal3 antibody or binding fragment thereof,
[0723] wherein binding of the anti-Gal3 antibody or binding fragment thereof to Gal3 in the subject inhibits Gal3-mediated oligomerization of phospho tau in the subject, thereby treating Alzheimer's disease in the subject.

[0724] 44. A method of treating tauopathies in a subject in need thereof, comprising:
[0725] administering to the subject an anti-Gal3 antibody or binding fragment thereof,
[0726] wherein binding of the anti-Gal3 antibody or binding fragment thereof to Gal3 in the subject inhibits Gal3-mediated oligomerization of phospho tau in the subject, thereby treating the tauopathy in the subject.

[0727] 45. A method of inhibiting Gal3-mediated oligomerization of alpha synuclein, comprising:
[0728] contacting the protein with an anti-Gal3 antibody or binding fragment thereof,
[0729] wherein binding of the anti-Gal3 antibody or binding fragment thereof to Gal3 inhibits Gal3-mediated oligomerization of alpha synuclein.

[0730] 46. A method of treating Lewy body disease in a subject in need thereof, comprising: administering to the subject an anti-Gal3 antibody or binding fragment thereof,
[0731] wherein binding of the anti-Gal3 antibody or binding fragment thereof to Gal3 in the
[0732] subject inhibits Gal3-mediated oligomerization of alpha synuclein in the subject, thereby treating Lewy body disease in the subject.

[0733] 47. A method of treating multiple system atrophy in a subject in need thereof, comprising:
[0734] administering to the subject an anti-Gal3 antibody or binding fragment thereof,
[0735] wherein binding of the anti-Gal3 antibody or binding fragment thereof to Gal3 in the subject inhibits Gal3-mediated oligomerization of alpha synuclein in the subject, thereby treating multiple system atrophy in the subject.

[0736] 48. A method of inhibiting Gal3-mediated oligomerization of APOE-4, comprising:
[0737] contacting the protein with an anti-Gal3 antibody or binding fragment thereof,
[0738] wherein binding of the anti-Gal3 antibody or binding fragment thereof to Gal3 inhibits Gal3-mediated oligomerization of APOE-4.

[0739] 49. A method of treating Alzheimer's disease in a subject in need thereof, comprising:
[0740] administering to the subject an anti-Gal3 antibody or binding fragment thereof,
[0741] wherein binding of the anti-Gal3 antibody or binding fragment thereof to Gal3 in the subject inhibits Gal3-mediated oligomerization of APOE-4 in the subject, thereby treating Alzheimer's disease in the subject.

[0742] 50. A method of treating CAA in a subject in need thereof, comprising:
[0743] administering to the subject an anti-Gal3 antibody or binding fragment thereof,
[0744] wherein binding of the anti-Gal3 antibody or binding fragment thereof to Gal3 in the subject inhibits Gal3-mediated oligomerization of alpha synuclein in the subject, thereby treating CAA in the subject.

[0745] 51. A method of inhibiting Gal3-mediated oligomerization of cholesterol, comprising: contacting the protein with an anti-Gal3 antibody or binding fragment thereof, wherein binding of the anti-Gal3 antibody or binding fragment thereof to Gal3 inhibits Gal3-mediated oligomerization of cholesterol.

[0746] 52. A method of treating Alzheimer's disease in a subject in need thereof, comprising:
[0747] administering to the subject an anti-Gal3 antibody or binding fragment thereof,
[0748] wherein binding of the anti-Gal3 antibody or binding fragment thereof to Gal3 in the subject inhibits Gal3-mediated oligomerization of cholesterol in the subject, thereby treating Alzheimer's disease in the subject.

[0749] 53. A method of treating cardiovascular disease in a subject in need thereof, comprising:
[0750] administering to the subject an anti-Gal3 antibody or binding fragment thereof,
[0751] wherein binding of the anti-Gal3 antibody or binding fragment thereof to Gal3 in the subject inhibits Gal3-mediated oligomerization of cholesterol in the subject, thereby treating cardiovascular disease in the subject.

[0752] 54. A method of treating atherosclerosis disease in a subject in need thereof, comprising:
[0753] administering to the subject an anti-Gal3 antibody or binding fragment thereof,
[0754] wherein binding of the anti-Gal3 antibody or binding fragment thereof to Gal3 in the subject inhibits Gal3-mediated oligomerization of cholesterol in the subject, thereby treating atherosclerosis in the subject.

[0755] 55. A method of inhibiting Gal3-mediated oligomerization of cholesteryl, comprising:
[0756] contacting the protein with an anti-Gal3 antibody or binding fragment thereof,
[0757] wherein binding of the anti-Gal3 antibody or binding fragment thereof to Gal3 inhibits Gal3-mediated oligomerization of cholesteryl.

[0758] 56. A method of treating Alzheimer's disease in a subject in need thereof, comprising:
[0759] administering to the subject an anti-Gal3 antibody or binding fragment thereof,
[0760] wherein binding of the anti-Gal3 antibody or binding fragment thereof to Gal3 in the subject inhibits Gal3-mediated oligomerization of cholesteryl in the subject, thereby treating Alzheimer's disease in the subject.

[0761] 57. A method of treating cardiovascular disease in a subject in need thereof, comprising:
[0762] administering to the subject an anti-Gal3 antibody or binding fragment thereof,
[0763] wherein binding of the anti-Gal3 antibody or binding fragment thereof to Gal3 in the subject inhibits Gal3-mediated oligomerization of cholesteryl in the subject, thereby treating cardiovascular disease in the subject.

[0764] 58. A method of treating atherosclerosis disease in a subject in need thereof, comprising:
[0765] administering to the subject an anti-Gal3 antibody or binding fragment thereof,
[0766] wherein binding of the anti-Gal3 antibody or binding fragment thereof to Gal3 in the subject inhibits Gal3-mediated oligomerization of cholesteryl in the subject, thereby treating atherosclerosis in the subject.

[0767] 59. A method of inhibiting Gal3-mediated oligomerization of neuroserpin, comprising:
[0768] contacting the protein with an anti-Gal3 antibody or binding fragment thereof,
[0769] wherein binding of the anti-Gal3 antibody or binding fragment thereof to Gal3 inhibits Gal3-mediated oligomerization of neuroserpin.

[0770] 60. A method of treating familial encephalopathy with neuroserpin inclusion bodies (FENIB) in a subject in need thereof, comprising:
[0771] administering to the subject an anti-Gal3 antibody or binding fragment thereof,
[0772] wherein binding of the anti-Gal3 antibody or binding fragment thereof to Gal3 in the subject inhibits Gal3-mediated oligomerization of neuroserpin in the subject, thereby treating familial encephalopathy with neuroserpin inclusion bodies (FENIB) in the subject.

[0773] 61. A method of inhibiting Gal3-mediated oligomerization of insulin, comprising:
[0774] contacting the protein with an anti-Gal3 antibody or binding fragment thereof,
[0775] wherein binding of the anti-Gal3 antibody or binding fragment thereof to Gal3 inhibits Gal3-mediated oligomerization of insulin.

[0776] 62. A method of treating insulin-derived amyloidosis in a subject in need thereof, comprising:
[0777] administering to the subject an anti-Gal3 antibody or binding fragment thereof,
[0778] wherein binding of the anti-Gal3 antibody or binding fragment thereof to Gal3 in the subject inhibits Gal3-mediated oligomerization of insulin in the subject, thereby treating insulin-derived amyloidosis in the subject.

[0779] 63. A method of treating diabetes in a subject in need thereof, comprising:
[0780] administering to the subject an anti-Gal3 antibody or binding fragment thereof,
[0781] wherein binding of the anti-Gal3 antibody or binding fragment thereof to Gal3 in the subject inhibits Gal3-mediated oligomerization of insulin in the subject, thereby treating diabetes in the subject.

[0782] 64. A method of inhibiting Gal3-mediated oligomerization of cystatin-c, comprising:
[0783] contacting the protein with an anti-Gal3 antibody or binding fragment thereof,
[0784] wherein binding of the anti-Gal3 antibody or binding fragment thereof to Gal3 inhibits Gal3-mediated oligomerization of cystatin-c.

[0785] 65. A method of treating Alzheimer's disease in a subject in need thereof, comprising:
[0786] administering to the subject an anti-Gal3 antibody or binding fragment thereof,
[0787] wherein binding of the anti-Gal3 antibody or binding fragment thereof to Gal3 in the subject inhibits Gal3-mediated oligomerization of cystatin-c in the subject, thereby treating Alzheimer's disease in the subject.

[0788] 66. A method of treating CAA in a subject in need thereof, comprising:
[0789] administering to the subject an anti-Gal3 antibody or binding fragment thereof,
[0790] wherein binding of the anti-Gal3 antibody or binding fragment thereof to Gal3 in the subject inhibits Gal3-mediated oligomerization of cystatin-c in the subject, thereby treating CAA in the subject.

[0791] 67. A method of treating kidney disease in a subject in need thereof, comprising:
[0792] administering to the subject an anti-Gal3 antibody or binding fragment thereof,
[0793] wherein binding of the anti-Gal3 antibody or binding fragment thereof to Gal3 in the subject inhibits Gal3-mediated oligomerization of cystatin-c in the subject, thereby treating kidney disease in the subject.

[0794] 68. A method of inhibiting Gal3-mediated oligomerization of prion protein, comprising:
[0795] contacting the protein with an anti-Gal3 antibody or binding fragment thereof,
[0796] wherein binding of the anti-Gal3 antibody or binding fragment thereof to Gal3 inhibits Gal3-mediated oligomerization of prion protein.

[0797] 69. A method of treating prion disease in a subject in need thereof, comprising:
[0798] administering to the subject an anti-Gal3 antibody or binding fragment thereof,
[0799] wherein binding of the anti-Gal3 antibody or binding fragment thereof to Gal3 in the subject inhibits Gal3-mediated oligomerization of prion protein in the subject, thereby treating prion disease in the subject.

[0800] 70. A method of treating transmissible spongiform encephalopathy (TSE) in a subject in need thereof, comprising:
[0801] administering to the subject an anti-Gal3 antibody or binding fragment thereof,
[0802] wherein binding of the anti-Gal3 antibody or binding fragment thereof to Gal3 in the subject inhibits Gal3-mediated oligomerization of prion protein in the subject, thereby treating transmissible spongiform encephalopathy (TSE) in the subject.

[0803] 71. A method of treating familial Creutzfeldt-Jakob disease (CJD) in a subject in need thereof, comprising:
[0804] administering to the subject an anti-Gal3 antibody or binding fragment thereof,
[0805] wherein binding of the anti-Gal3 antibody or binding fragment thereof to Gal3 in the subject inhibits Gal3-mediated oligomerization of prion protein in the subject, thereby treating familial Creutzfeldt-Jakob disease (CJD) in the subject.

[0806] 72. A method of treating fatal familial insomnia in a subject in need thereof, comprising:
[0807] administering to the subject an anti-Gal3 antibody or binding fragment thereof,
[0808] wherein binding of the anti-Gal3 antibody or binding fragment thereof to Gal3 in the subject inhibits Gal3-mediated oligomerization of prion protein in the subject, thereby treating fatal familial insomnia in the subject.

[0809] 73. A method of treating Gerstmann-Straussler-Scheinker disease in a subject in need thereof, comprising:
[0810] administering to the subject an anti-Gal3 antibody or binding fragment thereof,
[0811] wherein binding of the anti-Gal3 antibody or binding fragment thereof to Gal3 in the subject inhibits Gal3-mediated oligomerization of prion protein in the subject, thereby treating Gerstmann-Straussler-Scheinker disease in the subject.

[0812] 74. A method of inhibiting Gal3-mediated oligomerization of myostatin, comprising:
[0813] contacting the protein with an anti-Gal3 antibody or binding fragment thereof,
[0814] wherein binding of the anti-Gal3 antibody or binding fragment thereof to Gal3 inhibits Gal3-mediated oligomerization of myostatin.

[0815] 75. A method of treating idiopathic inflammatory myopathies (IIM) in a subject in need thereof, comprising:
[0816] administering to the subject an anti-Gal3 antibody or binding fragment thereof,
[0817] wherein binding of the anti-Gal3 antibody or binding fragment thereof to Gal3 in the subject inhibits Gal3-mediated oligomerization of myostatin in the subject, thereby treating idiopathic inflammatory myopathies (IIM) in the subject.

[0818] 76. A method of inhibiting Gal3-mediated oligomerization of transthyretin, comprising:
[0819] contacting the protein with an anti-Gal3 antibody or binding fragment thereof,
[0820] wherein binding of the anti-Gal3 antibody or binding fragment thereof to Gal3 inhibits Gal3-mediated oligomerization of transthyretin.

[0821] 77. A method of treating transthyretin amyloidosis in a subject in need thereof, comprising:
[0822] administering to the subject an anti-Gal3 antibody or binding fragment thereof,
[0823] wherein binding of the anti-Gal3 antibody or binding fragment thereof to Gal3 in the subject inhibits Gal3-mediated oligomerization of transthyretin in the subject, thereby treating transthyretin amyloidosis in the subject.

[0824] 78. A method of treating heart and/or kidney disease in a subject in need thereof, comprising:
[0825] administering to the subject an anti-Gal3 antibody or binding fragment thereof,
[0826] wherein binding of the anti-Gal3 antibody or binding fragment thereof to Gal3 in the subject inhibits Gal3-mediated oligomerization of transthyretin in the subject, thereby treating heart and/or kidney disease in the subject.

[0827] 79. A method of treating preeclampsia in a subject in need thereof, comprising:
[0828] administering to the subject an anti-Gal3 antibody or binding fragment thereof,
[0829] wherein binding of the anti-Gal3 antibody or binding fragment thereof to Gal3 in the subject inhibits Gal3-mediated oligomerization of transthyretin in the subject, thereby treating preeclampsia in the subject.

[0830] 80. A method of inhibiting Gal3-mediated oligomerization of phenylalanine, comprising:
[0831] contacting the protein with an anti-Gal3 antibody or binding fragment thereof,
[0832] wherein binding of the anti-Gal3 antibody or binding fragment thereof to Gal3 inhibits Gal3-mediated oligomerization of phenylalanine.

[0833] 81. A method of treating phenylketonuria in a subject in need thereof, comprising:
[0834] administering to the subject an anti-Gal3 antibody or binding fragment thereof,
[0835] wherein binding of the anti-Gal3 antibody or binding fragment thereof to Gal3 in the subject inhibits Gal3-mediated oligomerization of phenylalanine in the subject, thereby treating phenylketonuria in the subject.

[0836] 82. A method of inhibiting Gal3-mediated oligomerization of glutamine, comprising:
[0837] contacting the protein with an anti-Gal3 antibody or binding fragment thereof,
[0838] wherein binding of the anti-Gal3 antibody or binding fragment thereof to Gal3 inhibits Gal3-mediated oligomerization of glutamine.

[0839] 83. A method of treating Huntington Disease in a subject in need thereof, comprising:
[0840] administering to the subject an anti-Gal3 antibody or binding fragment thereof,
[0841] wherein binding of the anti-Gal3 antibody or binding fragment thereof to Gal3 in the subject inhibits Gal3-mediated oligomerization of glutamine in the subject, thereby treating Huntington Disease in the subject.

[0842] 84. A method of inhibiting Gal3-mediated oligomerization of Neurofibrillary Light chain (NFL), comprising:
[0843] contacting the protein with an anti-Gal3 antibody or binding fragment thereof,
[0844] wherein binding of the anti-Gal3 antibody or binding fragment thereof to Gal3 inhibits Gal3-mediated oligomerization of NFL.

[0845] 85. A method of treating motor neuron degeneration in a subject in need thereof, comprising:
[0846] administering to the subject an anti-Gal3 antibody or binding fragment thereof,
[0847] wherein binding of the anti-Gal3 antibody or binding fragment thereof to Gal3 in the subject inhibits Gal3-mediated oligomerization of NFL in the subject, thereby treating motor neuron degeneration in the subject.

[0848] 86. A method of inhibiting Gal3-mediated amyloid aggregation of fibrin, comprising:
[0849] contacting the protein with an anti-Gal3 antibody or binding fragment thereof,
[0850] wherein binding of the anti-Gal3 antibody or binding fragment thereof to Gal3 inhibits Gal3-mediated oligomerization of fibrin.

[0851] 87. A method of treating cerebrovascular damage in a subject in need thereof, comprising:
[0852] administering to the subject an anti-Gal3 antibody or binding fragment thereof,
[0853] wherein binding of the anti-Gal3 antibody or binding fragment thereof to Gal3 in the subject inhibits Gal3-mediated oligomerization of fibrin in the subject, thereby treating cerebrovascular damage in the subject.

[0854] 88. A method of treating stroke in a subject in need thereof, comprising:
[0855] administering to the subject an anti-Gal3 antibody or binding fragment thereof,
[0856] wherein binding of the anti-Gal3 antibody or binding fragment thereof to Gal3 in the subject inhibits Gal3-mediated oligomerization of fibrin in the subject, thereby treating stroke in the subject.

[0857] 89. A method of treating CAA in a subject in need thereof, comprising:
[0858] administering to the subject an anti-Gal3 antibody or binding fragment thereof,
[0859] wherein binding of the anti-Gal3 antibody or binding fragment thereof to Gal3 in the subject inhibits Gal3-mediated oligomerization of fibrin in the subject, thereby treating CAA in the subject.

[0860] 90. A method of treating Alzheimer's disease in a subject in need thereof, comprising:
[0861] administering to the subject an anti-Gal3 antibody or binding fragment thereof,
[0862] wherein binding of the anti-Gal3 antibody or binding fragment thereof to Gal3 in the subject inhibits Gal3-mediated oligomerization of fibrin in the subject, thereby treating Alzheimer's disease in the subject.

[0863] 91. A method of inhibiting Gal3-mediated oligomerization of lysozyme, comprising:
[0864] contacting the protein with an anti-Gal3 antibody or binding fragment thereof,
[0865] wherein binding of the anti-Gal3 antibody or binding fragment thereof to Gal3 inhibits Gal3-mediated oligomerization of lysozyme.

[0866] 92. A method of treating human systemic amyloid disease in a subject in need thereof, comprising:
[0867] administering to the subject an anti-Gal3 antibody or binding fragment thereof,
[0868] wherein binding of the anti-Gal3 antibody or binding fragment thereof to Gal3 in the subject inhibits Gal3-mediated oligomerization of lysozyme in the subject, thereby treating human systemic amyloid disease in the subject.

[0869] 93. A method of inhibiting Gal3-mediated amyloid aggregation of complement proteins C3 and/or C9, comprising:
[0870] contacting the protein with an anti-Gal3 antibody or binding fragment thereof,
[0871] wherein binding of the anti-Gal3 antibody or binding fragment thereof to Gal3 inhibits Gal3-mediated oligomerization of complement proteins C3 and/or C9.

[0872] 94. A method of treating disruption in innate immune system in a subject in need thereof, comprising:
[0873] administering to the subject an anti-Gal3 antibody or binding fragment thereof,
[0874] wherein binding of the anti-Gal3 antibody or binding fragment thereof to Gal3 in the subject inhibits Gal3-mediated oligomerization of complement proteins C3 and/or C9 in the subject, thereby treating disruption in innate immune system in the subject.

[0875] 95. A method of inhibiting Gal3-mediated oligomerization of crystallins, comprising:
[0876] contacting the protein with an anti-Gal3 antibody or binding fragment thereof,
[0877] wherein binding of the anti-Gal3 antibody or binding fragment thereof to Gal3 inhibits Gal3-mediated oligomerization of crystallins.

[0878] 96. A method of treating damage to lens of a subject's eye and/or blurring of vision in a subject in need thereof, comprising:
[0879] administering to the subject an anti-Gal3 antibody or binding fragment thereof,
[0880] wherein binding of the anti-Gal3 antibody or binding fragment thereof to Gal3 in the subject inhibits Gal3-mediated oligomerization of crystallins in the subject, thereby treating damage to lenses of the subject's eye and/or blurring of vision in the subject.

[0881] 97. A method of inhibiting Gal3-mediated oligomerization of atrial natriuretic peptide (ANP), comprising:
[0882] contacting the protein with an anti-Gal3 antibody or binding fragment thereof,
[0883] wherein binding of the anti-Gal3 antibody or binding fragment thereof to Gal3 inhibits Gal3-mediated oligomerization of ANP.

[0884] 98. A method of treating congestive heart failure (CHF) in a subject in need thereof, comprising:
[0885] administering to the subject an anti-Gal3 antibody or binding fragment thereof,
[0886] wherein binding of the anti-Gal3 antibody or binding fragment thereof to Gal3 in the subject inhibits Gal3-mediated oligomerization of ANP in the subject, thereby treating CHF in the subject.

[0887] 99. A method of treating cardiac amyloidosis in a subject in need thereof, comprising:
[0888] administering to the subject an anti-Gal3 antibody or binding fragment thereof,
[0889] wherein binding of the anti-Gal3 antibody or binding fragment thereof to Gal3 in the subject inhibits Gal3-mediated oligomerization of ANP in the subject, thereby treating cardiac amyloidosis in the subject.

[0890] 100. A method of inhibiting Gal3-mediated oligomerization of B-Type Natriuretic Peptide (BNP), comprising:
[0891] contacting the protein with an anti-Gal3 antibody or binding fragment thereof,
[0892] wherein binding of the anti-Gal3 antibody or binding fragment thereof to Gal3 inhibits Gal3-mediated oligomerization of BNP.

[0893] 101. A method of treating congestive heart failure (CHF) in a subject in need thereof, comprising:
[0894] administering to the subject an anti-Gal3 antibody or binding fragment thereof,
[0895] wherein binding of the anti-Gal3 antibody or binding fragment thereof to Gal3 in the subject inhibits Gal3-mediated oligomerization of BNP in the subject, thereby treating CHF in the subject.

[0896] 102. A method of treating cardiac amyloidosis in a subject in need thereof, comprising:
[0897] administering to the subject an anti-Gal3 antibody or binding fragment thereof,
[0898] wherein binding of the anti-Gal3 antibody or binding fragment thereof to Gal3 in the subject inhibits Gal3-mediated oligomerization of BNP in the subject, thereby treating cardiac amyloidosis in the subject.

[0899] 103. A method of inhibiting Gal3-mediated oligomerization calcitonin, comprising:
[0900] contacting the protein with an anti-Gal3 antibody or binding fragment thereof,
[0901] wherein binding of the anti-Gal3 antibody or binding fragment thereof to Gal3 inhibits Gal3-mediated amyloid aggregation of calcitonin.

[0902] 104. A method of treating medullary carcinoma of the thyroid (MTC) in a subject in need thereof, comprising:
[0903] administering to the subject an anti-Gal3 antibody or binding fragment thereof,
[0904] wherein binding of the anti-Gal3 antibody or binding fragment thereof to Gal3 in the subject inhibits Gal3-mediated oligomerization of calcitonin in the subject, thereby treating MTC in the subject.

[0905] 105. A method of treating osteoporosis in a subject in need thereof, comprising:
[0906] administering to the subject an anti-Gal3 antibody or binding fragment thereof,
[0907] wherein binding of the anti-Gal3 antibody or binding fragment thereof to Gal3 in the subject inhibits Gal3-mediated oligomerization of calcitonin in the subject, thereby treating osteoporosis in the subject.

[0908] 106. A method of treating Paget's Disease in a subject in need thereof, comprising:
[0909] administering to the subject an anti-Gal3 antibody or binding fragment thereof,
[0910] wherein binding of the anti-Gal3 antibody or binding fragment thereof to Gal3 in the subject inhibits Gal3-mediated oligomerization of calcitonin in the subject, thereby treating Paget's Disease in the subject.

[0911] 107. A method of inhibiting Gal3-mediated oligomerization of Serum Amyloid (A) (SAA), comprising:
[0912] contacting the protein with an anti-Gal3 antibody or binding fragment thereof,
[0913] wherein binding of the anti-Gal3 antibody or binding fragment thereof to Gal3 inhibits Gal3-mediated oligomerization of Serum Amyloid (A) (SAA).

[0914] 108. A method of treating peripheral amyloidosis in a subject in need thereof, comprising:
[0915] administering to the subject an anti-Gal3 antibody or binding fragment thereof,
[0916] wherein binding of the anti-Gal3 antibody or binding fragment thereof to Gal3 in the subject inhibits Gal3-mediated oligomerization of Serum Amyloid (A) (SAA) in the subject, thereby treating peripheral amyloidosis in the subject.

[0917] 109. A method of inhibiting Gal3-mediated amyloid aggregation of islet amyloid polypeptide (IAPP), comprising:
[0918] contacting the protein with an anti-Gal3 antibody or binding fragment thereof,
[0919] wherein binding of the anti-Gal3 antibody or binding fragment thereof to Gal3 inhibits Gal3-mediated oligomerization of IAPP.

[0920] 110. A method of treating type 2 diabetes in a subject in need thereof, comprising:
[0921] administering to the subject an anti-Gal3 antibody or binding fragment thereof,
[0922] wherein binding of the anti-Gal3 antibody or binding fragment thereof to Gal3 in the subject inhibits Gal3-mediated oligomerization of IAPP in the subject, thereby treating type 2 diabetes in the subject.

[0923] 111. A method of inhibiting Gal3-mediated amyloid aggregation of TAR DNA binding protein 43 (TDP-43), comprising:
[0924] contacting the protein with an anti-Gal3 antibody or binding fragment thereof,
[0925] wherein binding of the anti-Gal3 antibody or binding fragment thereof to Gal3 inhibits Gal3-mediated oligomerization of TDP-43.

[0926] 112. A method of treating amyotrophic lateral sclerosis (ALS) in a subject in need thereof, comprising:
[0927] administering to the subject an anti-Gal3 antibody or binding fragment thereof,
[0928] wherein binding of the anti-Gal3 antibody or binding fragment thereof to Gal3 in the subject inhibits Gal3-mediated oligomerization of TDP-43 in the subject, thereby treating ALS in the subject.

[0929] 113. A method of treating frontotemporal lobar degeneration (FTLD) in a subject in need thereof, comprising:
[0930] administering to the subject an anti-Gal3 antibody or binding fragment thereof,
[0931] wherein binding of the anti-Gal3 antibody or binding fragment thereof to Gal3 in the subject inhibits Gal3-mediated oligomerization of TDP-43 in the subject, thereby treating FTLD in the subject.

[0932] 114. The method of any one of the preceding arrangements, wherein the anti-Gal3 antibody or binding fragment thereof comprises (1) a heavy chain variable region comprising a V_{H}-CDR1, a V_{H}-CDR2, and a V_{H}-CDR3; and (2) a light chain variable region comprising a V_{L}-CDR1, a V_{L}-CDR2, and a V_{L}-CDR3, wherein
[0933] the V_{H}-CDR1 comprises an amino acid sequence having at least 80%, 81%, 82%, 83%, 84%, 85%, 86%, 87%, 88%, 89%, 90%, 91%, 92%, 93%, 94%, 95%, 96%, 97%, 98%, 99%, or 100% identity to any one of the amino acid sequences of SEQ ID NOs: 27-70;
[0934] the V_{H}-CDR2 comprises an amino acid sequence having at least 80%, 81%, 82%, 83%, 84%, 85%, 86%, 87%, 88%, 89%, 90%, 91%, 92%, 93%, 94%, 95%, 96%, 97%, 98%, 99%, or 100% identity to any one of the amino acid sequences of SEQ ID NOs: 71-111, 801, 951, 952;
[0935] the V_{H}-CDR3 comprises an amino acid sequence having at least 80%, 81%, 82%, 83%, 84%, 85%, 86%, 87%, 88%, 89%, 90%, 91%, 92%, 93%, 94%, 95%, 96%, 97%, 98%, 99%, or 100% identity to any one of the amino acid sequences of SEQ ID NO: 112-169, 802, 953, 954;
[0936] the V_{L}-CDR1 comprises an amino acid sequence having at least 80%, 81%, 82%, 83%, 84%, 85%, 86%, 87%, 88%, 89%, 90%, 91%, 92%, 93%, 94%, 95%, 96%, 97%, 98%, 99%, or 100% identity to any one of the amino acid sequences of SEQ ID NOs: 170-220;
[0937] the V_{L}-CDR2 comprises an amino acid sequence having at least 80%, 81%, 82%, 83%, 84%, 85%, 86%, 87%, 88%, 89%, 90%, 91%, 92%, 93%, 94%, 95%, 96%, 97%, 98%, 99%, or 100% identity to any one of the amino acid sequences of SEQ ID NOs: 211-247; and
[0938] the V_{L}-CDR3 comprises an amino acid sequence having at least 80%, 81%, 82%, 83%, 84%, 85%, 86%, 87%, 88%, 89%, 90%, 91%, 92%, 93%, 94%, 95%, 96%, 97%, 98%, 99%, or 100% identity to any one of the amino acid sequences of SEQ ID NOs: 248-296; or wherein the antibody or binding fragment thereof comprises a blocking antibody that competes for binding with any one or more of the preceding anti-Gal3 antibodies or binding fragments thereof, wherein the blocking antibody is at least 80% effective at outcompeting the anti-Gal3 antibody or binding fragment thereof.

[0939] 115. The method of any one of the preceding arrangements, wherein the anti-Gal3 antibody or binding fragment thereof comprises a combination of the V_{H}-CDR1, V_{H}-CDR2, V_{H}-CDR3, V_{L}-CDR1, V_{L}-CDR2, and V_{L}-CDR3 as illustrated in FIG. 13; or wherein the antibody or binding fragment thereof comprises a blocking antibody that competes for binding with any one or more of the preceding anti-Gal3 antibodies or binding fragments thereof, wherein the blocking antibody is at least 80% effective at outcompeting the anti-Gal3 antibody or binding fragment thereof.

[0940] 116. The method of any one of the preceding arrangements, wherein the heavy chain variable region comprises a sequence having at least 80%, 81%, 82%, 83%, 84%, 85%, 86%, 87%, 88%, 89%, 90%, 91%, 92%, 93%, 94%, 95%, 96%, 97%, 98%, or 99% identity to the sequence selected from SEQ ID NOs: 297-373, 803, 806-820, 940, 955-968, 1067-1109, 1415-1439; or wherein the antibody or binding fragment thereof comprises a blocking antibody that competes for binding with any one or more of the preceding anti-Gal3 antibodies or binding fragments thereof, wherein the blocking antibody is at least 80% effective at outcompeting the anti-Gal3 antibody or binding fragment thereof.

[0941] 117. The method of any one of the preceding arrangements, wherein the light chain variable region comprises a sequence having at least 80%, 81%, 82%, 83%, 84%, 85%, 86%, 87%, 88%, 89%, 90%, 91%, 92%, 93%, 94%, 95%, 96%, 97%, 98%, or 99% identity to the sequence selected from SEQ ID NOs: 374-447, 821-835, 941-943, 969-982, 1110-1152, 1440-1464; or wherein the antibody or binding fragment thereof comprises a blocking antibody that competes for binding with any one or more of the preceding anti-Gal3 antibodies or binding fragments thereof, wherein the blocking antibody is at least 80% effective at outcompeting the anti-Gal3 antibody or binding fragment thereof.

[0942] 118. The method of any one of the preceding arrangements, wherein the anti-Gal3 antibody or binding fragment thereof comprises a heavy chain, wherein the heavy chain comprises a sequence having at least 80%, 81%, 82%, 83%, 84%, 85%, 86%, 87%, 88%, 89%, 90%, 91%, 92%, 93%, 94%, 95%, 96%, 97%, 98%, or 99% identity to the sequence selected from SEQ ID NOs: 448-494, 804, 836-850, 983-996, 1153-1195, 1411, 1465-1489; or wherein the antibody or binding fragment thereof comprises a blocking antibody that competes for binding with any one or more of the preceding anti-Gal3 antibodies or binding fragments thereof, wherein the blocking antibody is at least 80% effective at outcompeting the anti-Gal3 antibody or binding fragment thereof.

[0943] 119. The method of any one of the preceding arrangements, wherein the anti-Gal3 antibody or binding fragment thereof comprises a light chain, wherein the light chain comprises a sequence having at least 80%, 81%, 82%, 83%, 84%, 85%, 86%, 87%, 88%, 89%, 90%, 91%, 92%, 93%, 94%, 95%, 96%, 97%, 98%, or 99% identity to the sequence selected from SEQ ID NOs: 495-538, 805, 851-865, 997-1010, 1196-1238, 1412, 1490-1514; or wherein the antibody or binding fragment thereof comprises a blocking antibody that competes for binding with any one or more of the preceding anti-Gal3 antibodies or binding fragments thereof, wherein the blocking antibody is at least 80% effective at outcompeting the anti-Gal3 antibody or binding fragment thereof.

[0944] 120. The method of any one of the preceding arrangements, wherein the anti-Gal3 antibody or binding fragment thereof is selected from the group consisting of at least one of: TB001, TB006, 12G5.D7, 13A12.2E5, 14H10.2C9, 15F10.2D6, 19B5.2E6, 20D11.2C6, 20H5.A3, 23H9.2E4, 2D10.2B2, 3B11.2G2, 7D8.2D8, mIMT001, 4A11.2B5, 4A11.H1L1, 4A11.H4L2, 4G2.2G6, 6B3.2D3, 6H6.2D6, 9H2.2H10, 13G4.2F8, 13H12.2F8, 15G7.2A7, 19D9.2E5, 23B10.2B12, 24D12.2H9, F846C.1B2, F846C.1F5, F846C.1H12, F846C.1H5, F846C.2H3, F846TC.14A2, F846TC.14E4, F846TC.16B5, F846TC.7F10, F847C.10B9, F847C.11B1, F847C.12F12, F847C.26F5, F847C.4B10, F849C.8D10, F849C.8H3, 846.2B11, 846.4D5, 846T.1H2, 847.14H4, 846.2D4, 846.2F11, 846T.10B1, 846T.2E3, 846T.4C9, 846T.4E11, 846T.4F5, 846T.8D1, 847.10C9, 847.11D6, 847.15D12, 847.15F9, 847.15H11, 847.20H7, 847.21B11, 847.27B9, 847.28D1, 847.2B8, 847.3B3, 849.1D2, 849.2D7, 849.2F12, 849.4B2, 849.4F12, 849.4F2, 849.5C2, 849.8D12, F847C.21H6, 849.5H1, 847.23F11, 847.16D10, 847.13E2-mH0mL1, 847.13E2-mH0mL2, 847.12C4, 847.4D3, 2D10-VH0-VL0, 2D10-hVH4-HVL1, 2D10-hVH4-HVL2, 2D10-hVH4-HVL3, 2D10-hVH4-HVL4, 2D10-hVH3-HVL1, 2D10-hVH3-HVL2, 2D10-hVH3-HVL3, 2D10-hVH3-HVL4, 20H5.A3-VH3VL1, 20H5.A3-VH3VL3, 20H5.A3-VH4VL1, 20H5.A3-VH5VL1, 20H5.A3-VH5VL3, 20H5.A3-VH6VL1, 20H5.A3-VH6VL3, or binding fragment thereof; or wherein the antibody or binding fragment thereof comprises a blocking antibody that competes for binding with any one or more of the preceding anti-Gal3 antibodies or binding fragments thereof, wherein the blocking antibody is at least 80% effective at outcompeting the anti-Gal3 antibody or binding fragment thereof.

[0945] 121. The method of any one of the preceding arrangements, wherein the anti-Gal3 antibody or binding fragment thereof is selected from the group consisting of at least one of: 2D10-VH0-VL0, 2D10-hVH4-HVL1, 2D10-hVH4-HVL2, 2D10-hVH4-HVL3, 2D10-hVH4-HVL4, 2D10-hVH3-HVL1, 2D10-hVH3-HVL2, 2D10-hVH3-HVL3, 2D10-hVH3-HVL4, or binding fragment thereof; or wherein the antibody or binding fragment thereof comprises a blocking antibody that competes for binding with any one or more of the preceding anti-Gal3 antibodies or binding fragments thereof, wherein the blocking antibody is at least 80% effective at outcompeting the anti-Gal3 antibody or binding fragment thereof; or wherein the antibody or binding fragment thereof comprises a blocking antibody that competes for binding with any one or more of the preceding anti-Gal3 antibodies or binding fragments thereof, wherein the blocking antibody is at least 80% effective at outcompeting the anti-Gal3 antibody or binding fragment thereof.

[0946] 122. The method of any one of the preceding arrangements, wherein the anti-Gal3 antibody or binding fragment thereof is selected from the group consisting of at least one of: 21H6-H0L0, 21H6-H1L1, 21H6-H1L2, 21H6-H1L3, 21H6-H1L4, 21H6-H2L1, 21H6-H2L2, 21H6-H2L3, 21H6-H2L4, 21H6-H3L1, 21H6-H3L2, 21H6-H3L3, 21H6-H3L4, 21H6-H4L1, 21H6-H4L2, 21H6-H4L3, 21H6-H4L4, 21H6-H5L1, 21H6-H5L2, 21H6-H5L3, 21H6-H5L4, 21H6-H6L1, 21H6-H6L2, 21H6-H6L3, 21H6-H6L4, or binding fragment thereof; or wherein the antibody or binding fragment thereof comprises a blocking antibody that competes for binding with any one or more of the preceding anti-Gal3 antibodies or binding fragments thereof, wherein the blocking antibody is at least 80% effective at outcompeting the anti-Gal3 antibody or binding fragment thereof.

[0947] 123. The method of any one of the preceding arrangements, wherein 80% is determined by a competition assay as provided in Example 54.

[0948] 124. The method of any one of the preceding arrangements, wherein 80% is determined as follows:
[0949] A) Ab diluted 2-fold in PBS from a concentration of 4 μg/ml and coated a 96-well ELISA plate by adding 80 μl per well;
[0950] B) After incubating the plate at 4° C. overnight, the plate is washed with 300 μl PBST three times, followed by a blocking step with 150 μl of 2% BSA in PBST per well and incubated for an hour at room temperature (RT) with gentle rocking;
[0951] C) Binding solutions are prepared by 2-fold dilutions from 4 μg/ml in a 2% buffer of BSA in PBST to a concentration of 4 μg/ml;
[0952] D) The dilution is then applied to the plate by adding 60 μl per well column-wise for each galectin-3, then serially diluted two-fold length-wise in 2% BSA in PBST;
[0953] E) The plate is incubated for an hour at RT with gentle rocking, then washed with 300 μl PBST three times;
[0954] F) Afterwards, HRP-tagged anti-FLAG antibodies are diluted to 1:2000 in 2% BSA in PBST, and 25 μl is added to all the wells
[0955] G) The plate is incubated for 40 minutes at RT with gentle rocking, then washed with 300 μl PBST three times;
[0956] H) To develop the plate, 50 μl of ABTS substrate is added to each well and incubated until a sufficiently high signal was achieved;
[0957] I) The plate is read in a plate reader at an absorbance of 405 nm; and optionally,
[0958] J) Data can be graphed using GraphPad Prism 8.0 software (GraphPad Software Inc).

[0959] 125. A method of inhibiting Gal3-mediated oligomerization, comprising:
[0960] contacting one or more monomers with an anti-Gal3 antibody or binding fragment thereof,
[0961] wherein binding of the anti-Gal3 antibody or binding fragment thereof to Gal3 inhibits Gal3-mediated oligomerization of the pone or more monomers.

### EXAMPLES

[0962] Some aspects of the embodiments discussed above are disclosed in further detail in the following examples, which are not in any way intended to limit the scope of the present disclosure. Those skilled in the art will appreciate that many other embodiments also fall within the scope of the invention, as it is described herein above and in the claims.

### Example 1. Gal3 Antibodies Block Gal3-Induced Aggregation of α-Synuclein

[0963] The pathological aggregation of α-Synuclein is a common feature of synucleinopathies including Parkinson's disease (PD), dementia with Lewy bodies and multiple system atrophy. To test whether anti-Gal3 antibodies could be utilized to inhibit synucleinopathies, it was first established that Gal3 promotes α-Synuclein aggregation. α-Synuclein was mixed with recombinant human Gal3 and the molecular weight of complexes were measured with Western blot.

[0964] The α-Synuclein protein (R&D Systems Cat #SP-485-500) was diluted to a final concentration of 0.1 mg/ml by adding 10 mM sodium phosphate buffer, pH 7.4. Only 0.1 mg/mL α-Synuclein, only 0.1 mg/mL Gal3, or the combination of α-Synuclein and Gal-3 were continuously stirred with a stir bar at room temperature, and samples were removed at 0, 1, 2, 3, 4, and 5 hours of incubation. Samples were then loaded onto a 4-12% Criterion™ XT Bis-Tris Protein Gel (Bio-Rad #3450124). The samples were separated at 100 V in SDS-PAGE apparatus (BioRad), and the resolved proteins were transferred onto a methanol-activated nitrocellulose membrane (Amersham GE #10600001) at 300 milliampere for 60 minutes. Nonspecific binding was blocked by incubating the membrane in 10% non-fat dried milk in TBS+Tween-20 (TBS-T) (Chem Cruz #281695) for 1 hour at room temperature. The blot was then incubated with the Syn1 mouse primary antibody (BD Biosciences #610787) specific for α-Synuclein overnight at 4° C. After three 5-minute washes in TBS-T, the membranes were incubated with anti-mouse HRP secondary antibody (Abcam #ab6789) for 1 hour at room temperature. Following three 5-minute washes in TBS-T, the membrane was incubated with chemiluminescent detection reagents (Advansta Cat #R-03021-D10 and #R-03031-D10) for 1-5 seconds. Images were captured on an Azure imager.

[0965] FIG. 4A-B demonstrate that Gal3 promotes the accumulation of α-Synuclein. FIG. 4A shows the Western blot where a higher molecular weight band (˜50 kDa) specifically detected by the α-Synuclein antibody was present when α-Synuclein was incubated with Gal3, but which was absent when incubated alone. FIG. 4B quantifies the progressive appearance of the aggregate over time shown in FIG. 4A.

[0966] A dot blot was performed with the samples of α-Synuclein only, α-Synuclein incubated with Gal3, and Gal3 only at time points 0, 1, 2, and 3 hours of incubation (FIG. 4C). The dot blot confirms the presence of α-Synuclein aggregates as detected by A11 antibody and α-Synuclein specific antibody.

[0967] Gal3 binding to aggregated alpha-synuclein was determined using an ELISA. Prior to the ELISA, human alpha-synuclein (R&D Systems, SP-485-500) was aggregated by multiple days of stirring, biotinylated using EZ Link Sulfo-NHS-LC-Biotin (ThermoFisher Scientific, A39257), and desalted with a Zeba Spin Desalting Column (ThermoFisher Scientific, 89882) following the manufacturers' instructions.

[0968] To start the ELISA, coating solutions were prepared by diluting galectin-3 proteins (TrueBinding, QCB200349) (TrueBinding, QCB200352) (Biolegend, 599806) in separate volumes of PBS (Corning, 21-030-CM), each to a concentration of 4 μg/ml. Coating solutions were applied to a 96-well ELISA plate (Thermo Scientific, 44-2401-21) by adding 80 μl per well along the top row of the plate, four wells per protein, then serially diluting two-fold downwards in PBS. After incubating the plate at 4° C. O/N, the plate was washed with 300 μl PBST three times, followed by a blocking step in which 150 μl of 2% BSA in PBST was added to every well and incubated for an hour at RT with gentle rocking. The existing blocking solution was then discarded from the plate. Alpha-synuclein solution for binding was prepared by diluting biotinylated aggregated alpha-synuclein in 2% BSA in PBST to a concentration of 4 μg/ml, then applied to the plate by adding 60 μl per well column-wise for three columns, one column for each galectin-3, then serially diluted two-fold length-wise rightwards in 2% BSA in PBST. The plate was incubated for an hour at RT with gentle rocking and then washed with 300 μl PBST three times. Afterward, Avidin-HRP (Biolegend, 405103) was diluted to 1:2000 in 2% BSA in PBST, then 25 μl was added to all the wells. The plate was incubated for an hour at RT with gentle rocking, then washed with 300 μl PBST three times. To develop the plate, 50 μl of TMB substrate was added to each well, incubated until a sufficient signal was reached, then stopped with 25 μl of 1N HCl per well. The plate was read in a plate reader at an absorbance of 450 nm. Data was graphed using GraphPad Prism 8.0 software (GraphPad Software Inc).

[0969] FIG. 91 depicts the results of the ELISA assay examining binding of hGal3 to aggregated alpha-synuclein. As can be seen in FIG. 91, hGal3 demonstrates strong binding to aggregated prion protein even at diminishing concentrations of aggregated alpha-synuclein or hGal3.

[0970] To identify anti-Gal3 antibodies with therapeutic potential, a screen of anti-Gal3 antibodies that block aggregation was conducted. An ELISA was used to evaluate blocking efficacies of various antibodies against galectin-3:: aggregated alpha-synuclein.

[0971] Prior to the ELISA, alpha-synuclein was aggregated by multiple days of stirring, biotinylated using EZ Link Sulfo-NHS-LC-Biotin (ThermoFisher Scientific, A39257), and desalted with a Zeba Spin Desalting Column (ThermoFisher Scientific, 89882) following the manufacturers' instructions.

[0972] Human Galectin-3 (Gal3) protein (TrueBinding, QCB200377) was diluted in PBS to a concentration of 4 μg/ml and coated a 96-well ELISA plate by applying 35 μl to each well. After incubating the plate at 4° C. O/N, the plate was washed three times with 300 μl PBST. The plate was then blocked for an hour with 150 μl of 2% BSA in PBST at RT with gentle rocking. Thereafter, the 2% BSA in PBST was discarded and 30 μl of TB001 (TrueBinding, QC190118), TB006 (TrueBinding, QC200208), several 20H5 (TrueBinding, various QC #), or Synagis hIgG4 Isotype (TrueBinding, QC190234) (3-fold serial dilutions beginning at 10 μg/ml) in 2% BSA in PBST was added to the wells, immediately followed by the addition of 30 μl of 1 μg/ml of biotinylated alpha-synuclein in 2% BSA in PBST. The plate was incubated for an hour at RT with gentle rocking and then washed three times with 300 μl PBST. Thereafter, Avidin HRP (Biolegend, 405103) was diluted in 2% BSA in PBST (1:2000 dilution) and 25 μl was added to the wells. The plate was incubated at RT for an hour with gentle rocking and washed three times with 300 μl PBST. 50 μl of ABTS (Life Technologies, 00-2024) was added to each well to develop, then the plate was read using a plate reader at an absorbance of 405 nm. Data was graphed using GraphPad Prism 8.0 software (GraphPad Software Inc).

[0973] FIGS. 74 and 75 are tables depicting the quantified results of the ELISA screen.

[0974] As can be seen in FIG. 74 several anti-Gal3 blocking antibodies, including 13A12.2E5-hIgG4 (S228P) [QC200135], 14H10.2C9-hIgG4 (S228P) [QC200137], 19B5-H3L2-hIgG4(S228P) (QC200044), 20D11.2C6-hIgG4(S228P) [QC200083], 20H5.A3-hIgG4(S228P) [QC200079], 2D10-VH0-VL0-hIgG4(S228P) [QC190195], 3B11.2G2-hIgG4(S228P) [QC200078], anti hGal3 pAb RD, 846.1B2-hIgG4(S228P) QC200087, 846.1F5-hIgG4(S228P) QC200110, 846.1H5-hIgG4(S228P) [QC200131], 846.2H3-hIgG4(S228P) QC200109, 846T.14A2-hIgG4(S338P) QC200122, 846T.14E4-hIgG4(S228P) QC200117, 846T.16B5-hIgG4(S228P) QC200101, and 846T.7F10-hIgG4(S228P) QC200100, displayed significant blocking activity with these clones having a galectin-3:: aggregated alpha-synuclein blocking efficacy of greater than at least 70%.

[0975] As can be seen in FIG. 75 several anti-Gal3 blocking antibodies, including 849.8D10-hIgG4 (S228P) QC200084, 847.10B9-hIgG4(S288P) [QC200125], 847.26F5-hIgG4(S288P) [QC200129], 84712F12-hIgG4(S288P) [QC200127], 15G7.2A7-hIgG4(S228P) (QC200074), anti-hGal3 pAb, TB006 (QC200010), 849.8H3-hIgG4 (S288P) (QC200086), IMT006-5-F(ab′)2 [QC200147], 847.27B9-hIgG4(S288P) (QC200161), and TB001 (QC190118) displayed significant blocking activity with these clones having a galectin-3:: aggregated alpha-synuclein blocking efficacy of greater than at least 70%.

### Example 2. Gal3 Antibodies Block α-Synuclein Aggregate-Induced Cell Toxicity

[0976] α-Synuclein can cause neuronal cell death, leading to loss of dopaminergic neurons. To test whether anti-Gal3 antibodies could be utilized to inhibit α-Synuclein pathology, it will be first established if α-Synuclein aggregates formed in the presence of Gal3 can lead to cell toxicity. Apoptosis in the SH-SY5Y neuroblastoma cell line will be compared after treatment with α-Synuclein or α-Synuclein aggregated with Gal3.

[0977] SH-SY5Y cells will be differentiated to a dopaminergic phenotype by incubating them for four days with 10 μM retinoic acid. Differentiated cells will be re-plated and stimulated with α-Synuclein only, α-Synuclein pre-mixed with Gal3 to form aggregates, or Gal3 only. Unstimulated cells will act as controls. Apoptosis will be measured by lactate dehydrogenase (LDH) release according to manufacturer's instructions using the CytoTox 96® Non-Radioactive Cytotoxicity Assay (Promega #G1780) up to 72 hours after stimulation. It is expected that α-Synuclein pre-mixed with Gal3 to form aggregates will induce at least 10% more cell death than either unstimulated cells or α-Synuclein alone, or Gal3 alone.

[0978] To identify anti-Gal3 antibodies with therapeutic potential, a screen of anti-Gal3 antibodies that block cytotoxicity will be conducted. Various concentrations of antibodies will be incubated in the assays described above and attenuation of cell death will be assessed. Antibodies that block cytotoxicity will be identified. It is expected that antibodies that block α-Synuclein-induced cytotoxicity by at least 10% and those that do not affect aggregation will be identified. Blockers can be sub-categorized further by epitope binning.

### Example 3. Gal3 Antibodies Block α-Synuclein Aggregate-Induced Microglial Cell Activation

[0979] α-Synuclein can cause microglia activation, leading to neuroinflammation. To test whether anti-Gal3 antibodies could be utilized to inhibit α-Synuclein pathology, it will be first established if α-Synuclein aggregates formed in the presence of Gal3 lead to microglia activation. Activation in the human HMC3 (ATCC #CRL-3304) and mouse BV2 microglia cell line will be compared after treatment with α-Synuclein or α-Synuclein aggregated with Gal3.

[0980] Microglia cells will be plated and stimulated with α-Synuclein only, α-Synuclein pre-mixed with Gal3 to form aggregates, or Gal3 only. Unstimulated cells will act as controls. Activation will be measured up to 72 hours after stimulation by ELISAs against TNFα, IL-1β or IL-6, according to manufacturer's instructions. It is expected that α-Synuclein pre-mixed with Gal3 to form aggregates will induce at least 10% more TNFα, IL-1β or IL-6 than either unstimulated cells, α-Synuclein alone, or Gal3 alone.

[0981] To identify anti-Gal3 antibodies with therapeutic potential, a screen of anti-Gal3 antibodies that block activation will be conducted. Various concentrations of antibodies will be incubated in the assays described above and attenuation of activation will be assessed. It is expected that antibodies that block α-Synuclein-induced activation by at least 10% and those that do not affect activation will be identified. Blockers can be sub-categorized further by epitope binning.

### Example 4. Gal3 Antibodies Ameliorate Synucleinopathies in Small Animal Models

[0982] Parkinson's Disease, an example of a synucleinopathy, is initiated by accumulation of α-Synuclein aggregates in the substantia nigra of the brain and subsequent death of dopaminergic neurons. To identify anti-Gal3 antibodies that attenuate synucleinopathies, mouse models of Parkinson's Disease will be treated with anti-Gal3 antibodies. α-Synuclein aggregates will be injected into the brains of mice, which leads to a Parkinson's-like disease.

[0983] Animals will be tested for symptoms of Parkinson's disease with behavioral tests (Rotarod for locomotor function) and plasma dopamine level (ELISA). After symptoms are detected, animals will be treated with anti-Gal3 antibodies. At the end of the study, behavior will be tested again, biomarkers from plasma and cerebrospinal fluid (CSF) will be measured, and brain IHC will be used to detect mechanistic changes.

[0984] It is expected that anti-Gal3 antibodies improve locomotor function by at least 10%, showing improved physiology. It is expected that anti-Gal3 antibodies elevate plasma and CSF dopamine levels and the area of brain IHC staining for NeuN (a marker of neurons) by at least 10% each, showing blocks to the reduction in neurons that produce dopamine. It is expected that the area of brain section detected by A11 phospho-Ser129 α-synuclein antibody (a post-translational modification promoting oligomerization) or Congo Red (a marker of plaques) will be reduced by at least 10% upon anti-Gal3 treatment, showing blocks to α-synuclein aggregation that causes neuronal death and dopamine reduction. It is expected that the area of the brain section detected by Iba-1 (an activated microglia antibody) or GFAP (an activated astrocyte marker) will be reduced by at least 10% upon anti-Gal3 treatment, showing treatment reduces neuroinflammation.

### Example 5: Gal3 Promotes Aggregation of Tau

[0985] Neurofibrillary tangles are abnormal insoluble aggregates of Tau that cause microtubule dysfunction, neuronal degeneration, and tauopathies such as Alzheimer's disease, progressive supranuclear palsy, corticobasal degeneration and Pick's disease. To test whether anti-Gal3 antibodies could be utilized to inhibit tauopathies, it was first established that Gal3 promotes Tau aggregation. Tau was mixed with recombinant human Gal3, and molecular weight of complexes were measured with Western blot.

[0986] The 1N4RTau peptide (Tau isoform 4) (R&D Systems #SP-501-100) was diluted to a final concentration of 0.1 mg/ml by adding 10 mM sodium phosphate buffer, pH 7.4. 0.1 mg/mL Tau peptide only, 0.1 mg/mL Gal3 only, or the combination of Tau and Gal3 were continuously stirred with a stir bar for 0 and 5 hours at room temperature. Samples were then loaded onto a 4-12% Criterion™ XT Bis-Tris Protein Gel (Bio-Rad #3450124). The gel was then run at 100 V in SDS-PAGE apparatus (Biorad), and the resolved proteins were transferred onto a methanol-activated nitrocellulose membrane (Amersham GE #10600001) at 300 milliamperes for 60 minutes. Nonspecific binding was blocked by incubating the membrane in 10% non-fat dried milk in TBS+Tween-20 (TBS-T) (Chem Cruz #281695) for 1 hour at room temperature. The blot was then incubated in the Tau-5 primary antibody (Invitrogen #AHB0042) specific for total Tau protein overnight at 4° C. After three 5-minute washes in TBS-T, the membranes were incubated with anti-mouse HRP secondary antibody (Abcam #ab6789) for 1 hour at room temperature. Following three 5-minute washes in TBS-T, the membrane was incubated for 1-5 seconds in equal amounts of chemiluminescent detection reagents pre-mixed together (Advansta Cat #R-03021-D10 and #R-03031-D10). Images were captured on an Azure imager.

[0987] FIG. 5A demonstrates that Gal3 promoted the accumulation of higher molecular weight aggregates of Tau (˜75 and 110 kDa), which were nearly undetectable when Tau was incubated alone. The higher molecular weight aggregates observed may be due to conformational changes in the Tau proteins, in addition to additional complex and oligomer formation. No Gal3 was observed to co-migrate at the ˜75 kDa band. FIG. 5B shows the quantification of the aggregates shown in FIG. 5A.

[0988] Dot blots were performed with the samples of 1N4RTau (4RTau) only, 4RTau incubated with Gal3, and Gal3 only at time points 0, 1, 2, 3, 4, and 5 hours of incubation (FIG. 5C). The dot blots suggest that 4RTau is oligomerized very slightly by Gal3, as detected by A11 antibody and Tau-5 total tau protein specific antibody. Anti-Gal3 antibody (804) was also used to confirm the presence of Gal3 in the dot blots.

[0989] Similar dot blots were also performed following the Gal3/Tau incubation step using phosphorylated Tau (phospho-tau (S396)) after time points of 0, 0.5, 1, 2, 3, 4, 5, and 24 hours of incubation (FIG. 5D). The dot blots suggest that unlike the 4RTau samples, Gal3 heavily promoted oligomerization of phospho-tau (S396), as detected by A11 antibody and phospho-tau (S396)-specific antibody, while phospho-tau alone did not oligomerize to a significant measure in the time points tested. Anti-Gal3 antibody (804) was also used to confirm the presence of Gal3 in the dot blots.

[0990] As shown here, the promotion of aggregation of Tau (such as phospho-tau) by Gal3 is strikingly efficient. Phospho-tau oligomers can be achieved on the order of hours when incubated with Gal3 at room temperature. This is compared to previous methods, which involve the use of other inducers such as heparin or arachnoid acid, which still takes on the order of 3-4 days at 37° C.

### Example 6: Gal3 Binds Aggregated Phospho-Tau

[0991] To test whether anti-Gal3 antibodies could be utilized to inhibit tauopathies, it was first established using an ELISA that Gal3 is involved in the formation of aggregated phospho-tau.

[0992] Prior to the ELISA, human alpha-synuclein (R&D Systems, SP-485-500) was aggregated by multiple days of stirring, biotinylated using EZ Link Sulfo-NHS-LC-Biotin (ThermoFisher Scientific, A39257), and desalted with a Zeba Spin Desalting Column (ThermoFisher Scientific, 89882) following the manufacturers' instructions.

[0993] To start the ELISA, coating solutions were prepared by diluting galectin-3 proteins (TrueBinding, QCB200349) (TrueBinding, QCB200352) (Biolegend, 599806) in separate volumes of PBS (Corning, 21-030-CM), each to a concentration of 4 μg/ml. Coating solutions were applied to a 96-well ELISA plate (Thermo Scientific, 44-2401-21) by adding 80 μl per well along the top row of the plate, four wells per protein, then serially diluting two-fold downwards in PBS. After incubating the plate at 4° C. O/N, the plate was washed with 300 μl PBST three times, followed by a blocking step in which 150 μl of 2% BSA in PBST was added to every well and incubated for an hour at RT with gentle rocking. The existing blocking solution was then discarded from the plate. Phospho-tau solution for binding was prepared by diluting biotinylated aggregated phospho-tau in 2% BSA in PBST to a concentration of 4 μg/ml, then applied to the plate by adding 60 μl per well column-wise for three columns, one column for each galectin-3, then serially diluted two-fold length-wise rightwards in 2% BSA in PBST. The plate was incubated for an hour at RT with gentle rocking and then washed with 300 μl PBST three times. Afterward, Avidin-HRP (Biolegend, 405103) was diluted to 1:2000 in 2% BSA in PBST, then 25 μl was added to all the wells. The plate was incubated for an hour at RT with gentle rocking, then washed with 300 μl PBST three times. To develop the plate, 50 μl of TMB substrate was added to each well, incubated until a sufficient signal was reached, then stopped with 25 μl of 1N HCl per well. The plate was read in a plate reader at an absorbance of 450 nm. Data was graphed using GraphPad Prism 8.0 software (GraphPad Software Inc).

[0994] FIG. 73 depicts the results of the ELISA assay examining binding of hGal3 to aggregated phospho-Tau. As can be seen in FIG. 73, hGal3 demonstrates weak binding to aggregated phospho-Tau.

### Example 7: Gal3 Antibodies Block Gal3-Induced Aggregation of Phospho-Tau

[0995] To identify anti-Gal3 antibodies with therapeutic potential, a screen of anti-Gal3 antibodies that block aggregation was conducted. An ELISA was used to evaluate blocking efficacies of various antibodies against galectin-3:: aggregated phospho-tau.

[0996] Prior to the ELISA, phospho-tau was aggregated by multiple days of stirring, biotinylated using EZ Link Sulfo-NHS-LC-Biotin (ThermoFisher Scientific, A39257), and desalted with a Zeba Spin Desalting Column (ThermoFisher Scientific, 89882) following the manufacturers' instructions.

[0997] Human Galectin-3 (Gal3) protein (TrueBinding, QCB200377) was diluted in PBS to a concentration of 4 μg/ml and coated a 96-well ELISA plate by applying 35 μl to each well. After incubating the plate at 4° C. O/N, the plate was washed three times with 300 μl PBST. The plate was then blocked for an hour with 150 μl of 2% BSA in PBST at RT with gentle rocking. Thereafter, the 2% BSA in PBST was discarded and 30 μl of TB001 (TrueBinding, QC190118), TB006 (TrueBinding, QC200208), several 20H5 (TrueBinding, various QC #), or Synagis hIgG4 Isotype (TrueBinding, QC190234) (3-fold serial dilutions beginning at 10 μg/ml) in 2% BSA in PBST was added to the wells, immediately followed by the addition of 30 μl of 1 μg/ml of biotinylated phospho-tau in 2% BSA in PBST. The plate was incubated for an hour at RT with gentle rocking and then washed three times with 300 μl PBST. Thereafter, Avidin HRP (Biolegend, 405103) was diluted in 2% BSA in PBST (1:2000 dilution) and 25 μl was added to the wells. The plate was incubated at RT for an hour with gentle rocking and washed three times with 300 μl PBST. 50 μl of ABTS (Life Technologies, 00-2024) was added to each well to develop, then the plate was read using a plate reader at an absorbance of 405 nm. Data was graphed using GraphPad Prism 8.0 software (GraphPad Software Inc).

[0998] FIGS. 74 and 75 are tables depicting the quantified results of the ELISA screen.

[0999] As can be seen in FIG. 74 several anti-Gal3 blocking antibodies, including 13A12.2E5-hIgG4 (S228P) [QC200135], 14H10.2C9-hIgG4 (S228P) [QC200137], 19B5-H3L2-hIgG4(S228P) (QC200044), 20D11.2C6-hIgG4(S228P) [QC200083], 20H5.A3-hIgG4(S228P) [QC200079], 2D10-VH0-VL0-hIgG4(S228P) [QC190195], 3B11.2G2-hIgG4(S228P) [QC200078], 846.1B2-hIgG4(S228P) QC200087, 846.1F5-hIgG4(S228P) QC200110, 846.2H3-hIgG4(S228P) QC200109, 846T.14A2-hIgG4(S338P) QC200122, 846T.14E4-hIgG4(S228P) QC200117, and 846T.16B5-hIgG4(S228P) QC200101, displayed significant blocking activity with these clones having a galectin-3:: aggregated phospho-tau blocking efficacy of greater than at least 70%.

[1000] As can be seen in FIG. 75 several anti-Gal3 blocking antibodies, including 847.26F5-hIgG4(S288P) [QC200129], 84712F12-hIgG4(S288P) [QC200127], 15G7.2A7-hIgG4(S228P) (QC200074), TB006 (QC200010), 849.8H3-hIgG4 (S288P) (QC200086), IMT006-5-F(ab′)2 [QC200147], 847.27B9-hIgG4(S288P) (QC200161), and TB001 (QC190118), displayed significant blocking activity with these clones having a galectin-3 aggregated phospho-tau blocking efficacy of greater than at least 70%.

### Example 8: Gal3 Antibodies Block Tau Aggregate-Induced Neuronal Cell Toxicity

[1001] Tau can cause neuronal cell death, leading to loss of neurons. To test whether anti-Gal3 antibodies could be utilized to inhibit Tau pathology, it will be first established if Tau aggregates formed in the presence of Gal3 lead to cell toxicity. Apoptosis in the SH-SY5Y neuroblastoma cell line will be compared after treatment with Tau pre-incubated with or without Gal3.

[1002] SH-SY5Y cells will be plated and stimulated with Tau only, Tau pre-mixed with Gal3 to form aggregates, or Gal3 only. Unstimulated cells will act as controls. Cell death will be measured by lactate dehydrogenase (LDH) release according to manufacturer's instruction using the CytoTox 96® Non-Radioactive Cytotoxicity Assay (Promega #G1780) up to 72 hours after stimulation. It is expected that Tau pre-mixed with Gal3 to form aggregates will induce at least 10% more cell death than either unstimulated cells, α-Synuclein alone, or Gal3 alone.

[1003] To identify anti-Gal3 antibodies with therapeutic potential, a screen of anti-Gal3 antibodies that block cytotoxicity will be conducted. Various concentrations of antibodies will be incubated in the assays described above and attenuation of cell death will be assessed. Antibodies that block cytotoxicity by at least 10% and those that do not affect cytotoxicity will be identified. Blockers can be sub-categorized further by epitope binning.

### Example 9: Gal3 Antibodies Block Tau Aggregate-Induced Microglial Cell Activation

[1004] Tau aggregates can cause microglia activation, leading to neuroinflammation. To test whether anti-Gal3 antibodies could be utilized to inhibit Tau pathology, it will be first established if Tau aggregates formed in the presence of Gal3 lead to microglia activation. Activation in the human HMC3 (ATCC #CRL-3304) and mouse BV2 microglia cell line will be compared after treatment with Tau or Tau aggregated with Gal3.

[1005] Microglia cells will be plated and stimulated with Tau only, Tau pre-mixed with Gal3 to form aggregates, or Gal3 only. Unstimulated cells will act as controls. Activation will be measured up to 72 hours after stimulation by ELISAs against TNFα, IL-1β or IL-6, according to manufacturer's instructions. It is expected that Tau pre-mixed with Gal3 to form aggregates will induce at least 10% more TNFα, IL-1β or IL-6 than either unstimulated cells or Tau or Gal3 alone.

[1006] To identify anti-Gal3 antibodies with therapeutic potential, a screen of anti-Gal3 antibodies that block activation will be conducted. Various concentrations of antibodies will be incubated in the assays described above and attenuation of activation is assessed. It is expected that antibodies that block Tau-induced activation by at least 10% and those that do not affect activation will be identified. Blockers can be sub-categorized further by epitope binning.

### Example 10: Gal3 Antibodies Ameliorate Tauopathies in Small Animal Models

[1007] Alzheimer's disease, an example of a tauopathy, can be initiated by Tau aggregates. To identify anti-Gal3 antibodies that attenuate diseases driven by Tau aggregation, mouse models of tauopathies will be treated with anti-Gal3 antibodies. Tau aggregate injection into the brains of C57BL/6J mice leads to seeding of endogenous Tau aggregation and symptoms of dementia. In a second model, Aβ42 aggregate injection into the brains of C57BL/6J mice leads to Tau hyper-phosphorylation and aggregation and symptoms of dementia.

[1008] After Tau or Aβ42 aggregate injection, animals will be tested for symptoms of dementia with behavioral tests (Rotarod for locomotor function; Morris water maze or Y maze for cognitive function). After symptoms are detected, animals will be treated with anti-Gal3 antibodies. At the end of the study, behavior will be tested again, biomarkers from plasma and cerebrospinal fluid (CSF) will be measured and brain IHC will be used to detect mechanistic changes.

[1009] It is expected that anti-Gal3 antibodies improve locomotor or cognitive function by at least 10%, showing improved physiology. It is expected that anti-Gal3 antibodies will reduce plasma and CSF biomarkers (e.g. Aβ42, total Tau, phospho-Tau, neurofilament-light, neurofilament-heavy or Gal3) by at least 10%, showing improved pathology or target engagement using biomarkers. It is expected that the area of brain IHC staining for NeuN (a marker of neurons) will be increased by at least 10% each, showing blocks to the reduction in neurons. It is expected that the area of brain section detected by A11AT8 (a hyper-phosphorylated Tau antibody), AT100 (an aggregated Tau protein) or Congo Red (a marker of fibrils) will be reduced by at least 10% upon anti-Gal3 treatment, showing blocks to Tau aggregation that causes neuronal death. It is expected that the area of the brain section detected by Iba-1 (an activated microglia antibody) or GFAP (an activated astrocyte marker) will be reduced by at least 10% upon anti-Gal3 treatment, showing treatment reduces neuroinflammation. It is expected that the area of the brain section detected by Prussian Blue) will be reduced by at least 10% upon anti-Gal3 treatment, showing treatment reduces microhemorrhage.

### Example 11. Gal3 Antibodies Block Gal3-Induced Aggregation of TDP-43

[1010] TDP-43 proteinopathies can cause neurodegeneration. For instance, amyotrophic lateral sclerosis (ALS) and Frontotemporal lobar degeneration (FTLD) are caused by the neuronal death induced by mis-localized and/or aggregated TDP-43. To test whether anti-Gal3 antibodies could be utilized to inhibit TDP-43 proteinopathies, it was first established that Gal3 promotes TDP-43 aggregation. TDP-43 peptide was mixed with recombinant human Gal3 and aggregation was measured with dot blots and Western blot.

[1011] TDP-43 and Gal3 or their combination in 10 mM Phosphate buffer pH 7.4 were mixed continuously with a stir bar at 37° C. and aliquots were removed at 0, 0.5, 1, 2, 3, 4, 5 and 24 hours, and then frozen. To detect aggregates, samples were rapidly thawed at 37° C. and then 2 μL were loaded onto a nitrocellulose membrane and air-dried for 1 hour at room temperature. Equal loading was confirmed with Ponceau Red staining. After the Ponceau Red was washed off, the nitrocellulose was blocked in 10% non-fat milk/TBS-Tween-20, and then incubated for 1 hour with A11, anti-TDP-43, or anti-Gal3 antibodies. After washing, the nitrocellulose was incubated for 1 hour with 1:5000 Donkey anti-rabbit HRP detection antibody (Jackson ImmunoResearch #711-035-152) or donkey anti-mouse HRP (Jackson ImmunoResearch #715-035-151) secondary antibody. After a final wash, bands were detected with a chemiluminescent substrate (1:1 mixture of Advansta Cat #R-03021-D10 and #R-03031-D10). Images were captured on an Azure imager.

[1012] FIG. 6 shows a dot blot following TDP-43 aggregation. The time points when the samples were collected for the analysis are indicated. For all of the time points tested, the intensity of the amyloid oligomer-specific dots was stronger when Gal3 was added to the mixture, demonstrating that Gal3 promotes aggregation of TDP-43. Equal loading was confirmed by the intensity of blots probed with anti-TDP-43 antibody. Equal amounts of Gal3 were confirmed by the intensity of blots probed with anti-Gal3 antibody

[1013] TDP-43 was diluted to a final concentration of 0.1 mg/ml by adding 10 mM sodium phosphate buffer, pH 7.4. Only 0.1 mg/mL TDP-43, only 0.1 mg/mL Gal3, or the combination of TDP-43 and Gal3 were continuously stirred with a stir bar at room temperature, and samples were removed at 0, 1, 2, 3, 4, and 5 hours of incubation. Samples were then loaded onto a 4-12% Criterion™ XT Bis-Tris Protein Gel (Bio-Rad #3450124). The samples were separated at 100 V in SDS-PAGE apparatus (Biorad), and the resolved proteins were transferred onto a methanol-activated nitrocellulose membrane (Amersham GE #10600001) at 300 milliamperes for 60 minutes. Nonspecific binding was blocked by incubating the membrane in 10% non-fat dried milk in TBS+Tween-20 (TBS-T) (Chem Cruz #281695) for 1 hour at room temperature. The blot was then incubated with a TDP-43 primary antibody overnight at 4° C. After three 5-minute washes in TBS-T, the membranes were incubated with anti-mouse HRP secondary antibody (Abcam #ab6789) for 1 hour at room temperature. Following three 5-minute washes in TBS-T, the membrane was incubating in a mixing equal amounts of chemiluminescent detection reagents (Advansta Cat #R-03021-D10 and #R-03031-D10) for 1-5 seconds. Images were captured on an Azure imager and quantified. Blots were then stripped, blocked with milk, and re-probed with anti-Gal3 antibody. After washing, Gal3 was detected using an anti-mouse HRP secondary antibody (Abcam #ab6789) for 1 hour at room temperature. Following three 5-minute washes in TBS-T, the membrane was incubated in equal amounts of chemiluminescent detection reagents pre-mixed together (Advansta Cat #R-03021-D10 and #R-03031-D10) for 1-5 seconds. Images were captured on an Azure imager.

[1014] FIG. 7A shows a Western blot (re-probed after probing with anti-TDP-43 as shown in FIG. 7B) where Gal3 is detected at similar intensity in all samples that contained Gal3 during incubation. FIG. 7B shows a Western blot where higher molecular weight bands specifically detected by the TDP-43 antibody are present when TDP-43 was incubated with Gal3, but which was absent when incubated alone. FIG. 7C quantifies the progressive appearance of dimers and tetramers over time in the Western blot shown in FIG. 7B. This confirms the results of A11-probed dot blots demonstrating the appearance of amyloids when Gal3 was mixed with TDP-43.

[1015] To identify anti-Gal3 antibodies with therapeutic potential, a screen of anti-Gal3 antibodies that block aggregation will be conducted. Various concentrations of antibodies will be incubated with TDP-43 with or without Gal3, and A11 will be used to detect oligomers on dot blots. It is expected that antibodies that block TDP-43 aggregation by at least 10% and those that do not affect it will be identified. Blockers can be sub-categorized further by epitope binning.

### Example 12. Gal3 Antibodies Block TDP-43 Aggregation-Induced Neuronal Cytotoxicity and Microglial Cell Activation

[1016] TDP-43 aggregates can cause neuronal death autonomously or non-autonomously via activation of microglia. To identify Gal3 antibodies that reduce neuronal death induced by TDP-43 aggregates, it will first be established that Gal3 promotes TDP-43-induced cell death. Viability in neuronal cell lines in the presence or absence of microglial cell lines (mouse BV2 source; human HMC3 ATCC #CRL-3304) will be compared after treatment with TDP-43 or TDP-43 aggregated with Gal3.

[1017] Neuronal cells alone, microglial cells alone or the co-culture of microglial and neuronal cell will be grown in a 96 well plate, and then culture medium will be replaced with serum-free DMEM. TDP-43 alone, TDP-43 pre-mixed with Gal3 to form aggregates, or Gal3 alone will be added in concentrations from 2-25 μL to the plated cells. After 8-96 hours of incubation, supernatants will be collected to measure microglial activation and neuronal cells viability as described below.

[1018] Activation of microglia by TDP-43 aggregates will be measured with ELISA kits for the pro-inflammatory mediators IL-6, TNFα and IL-1β. It is expected that at least one mediator will be increased by at least 10% when stimulated by TDP-43 mixed with Gal3 compared to TDP-43 or Gal3 mixed alone. This demonstrates that Gal3-induced TDP-43 aggregates activate microglia.

[1019] For neuronal cell viability, cells will be stained against CD68, NeuN and Annexin V. Apoptosis will be assessed using Annexin V. Samples will be run on an Attune flow cytometer (Thermo-Fisher) and analyzed on Flow Jo software (TreeStar). Samples will be gated into CD68+ microglia and NeuN+ neurons and then the percent of Annexin V positive cells will be quantified within each gate. It is expected that cells incubated with the combination of Gal3 and TDP-43 will be at least 10% less viable than cells incubated with TDP-43 or Gal3 alone. It is expected that this occurs either in the presence or absence of microglia in the co-culture. These data demonstrate that Gal3-induced TDP-43 aggregates reduce neuronal viability in a cell autonomous or cell non-autonomous manner.

[1020] To identify anti-Gal3 antibodies with therapeutic potential, a screen of anti-Gal3 antibodies that block cell activation or cytotoxicity will be conducted. Various concentrations of antibodies will be incubated in the assays described above and attenuation of activation or cell death will be assessed. Antibodies that block activation or cytotoxicity by at least 10% will be identified. Blockers can be sub-categorized further by epitope binning.

### Example 13. Gal3 Antibodies Ameliorate ALS

[1021] ALS, an example of a TDP-43 proteinopathy, is caused by accumulation of toxic TDP-43 aggregates. To identify anti-Gal3 antibodies that can ameliorate ALS caused by TDP-43 aggregates, we will use a model of ALS. ALS is induced by bi-lateral stereotactic injection of TDP-43 oligomerized in the presence of Gal3. Un-injected animals will serve as healthy controls. To follow ALS progression, locomotor function will be assessed using the Rotarod test and cognitive function will be assessed using Morris water maze and Y maze tests. Decreased locomotor or cognitive function compared to healthy controls indicates ALS-like disease. After ALS symptoms are noted in the TDP-43-injected animals, anti-Gal3 antibodies or isotype controls will be dosed. Healthy controls will remain untreated. Treatment-induced changes to locomotor and cognitive function will again be assessed before sacrifice up to 8 weeks later. Pathophysiological changes caused by Gal3 antibody treatment will be assessed with IHC and ELISA on the brain and ELISA on plasma and CSF

[1022] It is expected that locomotor function will be improved by at least 10% in Gal3-treated animals compared to isotype control-treated animals. It is expected that cognitive function will be improved by at least 10% in one or more tests in Gal3-treated animals compared to isotype control-treated animals. It is expected that the area stained by Iba-1, MHC-II, GFAP or other inflammatory markers will be reduced by at least 10% in Gal3-treated animals compared to isotype control-treated animals in IHC. It is expected that the area stained by MAP-2, NeuN or other neuronal markers will be increased by at least 10% in anti-Gal3-treated animals compared to isotype control-treated animals in IHC. It is expected that the area stained by TDP-43, Aβ42, total tau, phosphorylated tau or other neurodegeneration markers will be reduced by at least 10% in anti-Gal3-treated animals compared to isotype control-treated animals in IHC. It is expected that the level of IL-6, IL-1β, TNFα or other inflammatory markers will be reduced by at least 10% in anti-Gal3-treated animals compared to isotype control-treated animals in ELISA of brain lysates. It is expected that the level of TDP-43, Aβ42, total tau, phosphorylated tau, NF-L, NF-M, NF-H, S100β, Cystatin C, PGRN, GFAP, BDNF, MCP-1, YKL-40, CHIT1, Gal3 or other ALS biomarker will be reduced by at least 10% in anti-Gal3-treated animals compared to isotype control-treated animals in ELISA of plasma or CSF.

### Example 14: Gal3 Antibodies Block Gal3-Induced Aggregation of Transthyretin

[1023] Cardiac amyloidosis (primary, secondary, familial or senile) is caused by the accumulation of amyloid aggregates or misfolding of amyloid proteins, such as desmin light chain or Transthyretin (TTR). TTR is a transport protein that carries thyroxine and retinol (vitamin A)-retinol binding protein complex. TTR amyloidosis (ATTR) can occur when TTR forms fibrils which are deposited in the myocardium, causing cardiomyopathy.

[1024] To test whether anti-Gal3 antibodies could be utilized to inhibit cardiac amyloidosis, it was established that Gal3 promotes TTR aggregation. TTR was mixed with recombinant human Gal3 and aggregation was measured. 0.1 mg/mL of transthyretin recombinant human protein (Invitrogen #LFP0054) was mixed with continuous stirring at room temperature with or without 0.1 mg/mL of Gal3 added. At 0 hours (immediately after mixing together) and at multiple time points up to 6 days later, 5 μL aliquots were removed and immediately frozen at −80° C. After all samples were collected, they were analyzed by Western and/or dot blots.

[1025] To detect enhanced protein size seen in aggregates, samples were rapidly thawed at 37° C. and then 5 μL was loaded onto a 4-12% Criterion™ XT Bis-Tris Protein Gel (Bio-Rad #3450124), transferred to nitrocellulose (Amersham GE #10600001), and equal loading was confirmed with Ponceau Red staining. After the Ponceau Red was washed off, the nitrocellulose was blocked in 10% non-fat milk/TBS-Tween-20, then incubated with 1:2000 of TTR antibody (Invitrogen #PA527220). After washing, the nitrocellulose was incubated for 1 hour with 1:5000 donkey anti-rabbit HRP detection antibody (Jackson ImmunoResearch #711-035-152). After a final wash, bands were detected with a chemiluminescent substrate (1:1 mixture of Advansta Cat #R-03021-D10 and #R-03031-D10). Images were captured on an Azure imager. A shift in the molecular weight of transthyretin indicated oligomerization.

[1026] FIG. 8A shows that Gal3 enhanced the level of dimeric TTR early (0-5 hours) after co-incubation and FIG. 8B quantifies the appearance of the dimers. Protein concentration was established prior to loading of the gels, and observed difference in signal is suspected to be due to partial epitope masking. After 24 hours, Gal3 also enhanced the level of trimers, tetramers and pentamers. FIG. 8C showed that Gal3 enhanced aggregation of TTR until at least 6 days after mixing and FIG. 8D quantifies the aggregates of FIG. 8C.

[1027] To identify anti-Gal3 antibodies with therapeutic potential, a screen of anti-Gal3 antibodies that block aggregation will be conducted. Various concentrations of antibodies will be incubated with Gal3 and TTR, and Western blots, as described above, will be used to detect antibodies that block aggregation. It is expected that antibodies that block TTR aggregation by at least 10% and those that do not affect aggregation will be identified. Blockers can be sub-categorized further by epitope binning.

### Example 15: Gal3 Antibodies Block Transthyretin Aggregate-Induced Cardiac Cell Toxicity

[1028] TTR aggregates can cause cardiomyocyte apoptosis. To identify Gal3 antibodies that reduce cardiomyocyte death induced by TTR aggregates, it will be first established that Gal3 promotes TTR-induced cell death. Viability in H9C2 Rat cardiomyocyte (ATCC-CRL-1446), AC16 Human Cardiomyocyte (Sigma-SCC109) or HL-1 Cardiac Muscle (Sigma-SCC065) cell lines will be compared after treatment with TTR pre-incubated with or without Gal3.

[1029] 5×10³ cells will be grown overnight in a 96 well plate, and then medium will be replaced with serum-free DMEM. Cells will be stimulated with 2-25 μL of TTR alone, TTR pre-mixed with Gal3 to form aggregates, or Gal3 alone. After 8-48 hours of incubation, the cell viability will be measured with Cell Titer Blue (Promega #G8080), according to manufacturer's instructions. It is expected that cells incubated with the combination of Gal3 and TTR will be at least 10% less viable than cells incubated with TTR or Gal3 alone.

[1030] To identify anti-Gal3 antibodies with therapeutic potential, a screen of anti-Gal3 antibodies that block cytotoxicity will be conducted. Various concentrations of antibodies will be incubated in the assays described above and attenuation of cell death will be assessed. Antibodies that block cytotoxicity by at least 10% will be identified. Blockers can be sub-categorized further by epitope binning.

### Example 16: Gal3 Antibodies Ameliorate Cardiac Amyloidosis

[1031] To identify anti-Gal3 antibodies that can ameliorate cardiac amyloidosis, two models of cardiomyopathy will be used.

[1032] TTR amyloid deposition in the myocardium results in arrhythmia (atrial fibrillation) and/or heart failure. TTR aggregates generated in vitro in the presence of Gal3 will be injected into the apex of the heart in C57BL6/J mice or Sprague-Dawley rats. Anti-Gal3 antibodies will be injected intra-peritoneally. TTR aggregates and fibrils will be detected on heart sections with A11 amyloid oligomer IHC and Congo Red. TTR aggregation will be confirmed by detecting shifts in TTR molecular weight from heart lysates probed with a TTR antibody on Western blots. Aggregate deposition in the heart will be quantified with Technetium pyrophosphate (99mTc-PYP) single photon emission computed tomography (SPECT). Cardiac injury will be measured by plasma biomarkers. Cardiac function will be measured using echocardiography.

[1033] It is expected that there will be at least a 10% reduction in the levels of aggregates in heart sections and lysates when animals are treated with anti-Gal3 antibodies compared to untreated animals. It is expected that there will be at least a 10% reduction in the oligomer deposition in the heart using SPECT when animals are treated with anti-Gal3 antibodies compared to untreated animals. It is expected that there will be at least a 10% change to ejection fraction on echocardiography when animals are treated with anti-Gal3 antibodies compared to untreated animals. It is expected that there will be at least a 10% reduction in biomarker levels (e.g. Brain natriuretic peptide, Soluble suppression of tumorigenesis-2, TTR, Gal3) when animals are treated with anti-Gal3 antibodies compared to untreated controls.

[1034] Transverse aortic constriction (TAC) will be performed on C57BL/6J mice to induce cardiac hypertrophy. Animals will be treated with anti-Gal3 antibodies. The presence of amyloid aggregates in the heart will be quantified by staining heart sections with A11 and Congo Red. Fibrosis will be measured on heart sections with Masson trichome and Picrosirius Red. Cardiac injury will be measured by quantifying levels of plasma biomarkers (ssT2, BNP, TTR, desmin) by ELISA. Cardiac function will be determined using echocardiograms (left ventricular wall thickness and ejection fraction).

[1035] It is expected that Gal3 antibodies will reduce aggregates and fibrils in the heart by at least 10% compared to untreated animals. It is expected that Gal3 antibodies will reduce fibrosis in the heart by at least 10% compared to untreated animals. It is expected that Gal3 antibodies will reduce cardiac injury by at least 10% compared to untreated animals. It is expected that Gal3 antibodies will improve cardiac function by at least 10% compared to untreated animals.

### Example 17: Gal3 Antibodies Block Gal3-Induced Aggregation of Uromodulin

[1036] Chronic kidney disease can be caused by the aggregation of amyloids such as light chain or uromodulin. Uromodulin is the most abundant protein in urine. Under some conditions, it can aggregate and coalesce into a gel-like substance known as renal casts that can obstruct fluid flow. To test whether anti-Gal3 antibodies could be utilized to inhibit uromodulin-mediated amyloidosis, it will be first established that Gal3 promotes uromodulin aggregation. Uromodulin will be mixed with recombinant human Gal3 and oligomerization will be measured with dot blots.

[1037] Uromodulin (15 μg) (Biovendor #RD172163100), Gal3 (15 μg) or their combination will be mixed continuously with a stir bar at 37° C. and aliquots removed at 0, 1, 2, 3 and 24 hours, and then frozen. To detect aggregates, samples will be rapidly thawed at 37° C. and then 2 μL will be loaded onto a nitrocellulose membrane and air-dried for 1 hour at room temperature. Equal loading will be confirmed with Ponceau Red staining. After the Ponceau Red is washed off, the nitrocellulose will be blocked in 10% non-fat milk/TBS-Tween-20, and then incubated for 1 hour with A11 antibody. After washing, the nitrocellulose will be incubated for 1 hour with 1:5000 Donkey anti-rabbit HRP detection antibody (Jackson ImmunoResearch #711-035-152). After a final wash, bands will be detected with a chemiluminescent substrate (1:1 mixture of Advansta Cat #R-03021-D10 and #R-03031-D10). Images will be captured on an Azure imager. It is expected that at 1 and 2 hours, the intensity of the amyloid oligomer-specific dots will be stronger when Gal3 was co-incubated, demonstrating that Gal3 promotes aggregation of uromodulin.

[1038] To identify anti-Gal3 antibodies with therapeutic potential, a screen of anti-Gal3 antibodies that block aggregation will be conducted. Various concentrations of antibodies will be incubated with uromodulin with or without Gal3, and A11 will be used to detect oligomers on dot blots. It is expected that antibodies that fully or partially block uromodulin aggregation by at least 10% and those that do not affect it will be identified. Blockers can be sub-categorized further by epitope binning.

### Example 18: Gal3 Antibodies Ameliorate Uromodulin-Associated Kidney Disease

[1039] Uromodulin synthesized by kidney tubular cells assembles into filaments that form a mesh-like structure where it traps bacteria and light chain immunoglobulins with its gel like structure. In a disease state, uromodulin filaments bind with sodium and form hard structures called casts, which cause decline in kidney function. In SHR rats, uromodulin amyloids develop with aging as the casts are formed.

[1040] To test if anti-Gal3 antibodies can ameliorate kidney disease caused by amyloids, aged SHR rats will be treated with Gal3 antibodies or isotype controls. Overall health will be measured by body, heart and kidney weight. Kidney dysfunction will be measured by the volume of urine produced while in metabolic cages. The number and size of casts in animals will be quantified using H&E staining on kidney sections. Kidney injury will be detected with biomarkers from plasma and urine using ELISA. The presence of uromodulin aggregates will be detected with Congo Red in urine and on kidney section as well as by measuring the molecular weight of uromodulin on Western blots.

[1041] It is expected that Gal3 antibodies will modulate kidney weight by at least 10% compared to isotype controls. It is expected that Gal3 antibodies will increase the volume of urine produced by at least 10% compared to isotype controls. It is expected that Gal3 antibodies will decrease the number or size of casts by at least 10% compared to isotype controls. It is expected that one or more of the following kidney injury biomarkers in plasma or urine will be modulated by at least 10% compared to isotype controls: N-GAL, KIM-1, IL-6, creatinine, glucose, albumin, BUN, K+, phosphorus, Na+, Ca+, tCO2.

### Example 19: Gal3 Antibodies Block Gal3-Induced Aggregation of IAPP

[1042] Islet Amyloid Polypeptide (IAPP) is secreted by pancreatic beta cells and normally modulates insulin activity in skeletal muscle, influencing energy homeostasis, satiety, blood glucose levels, adiposity, and body weight. When aggregated, it can be toxic to cells and promote insulin resistance and diabetes. To test whether anti-Gal3 antibodies could be utilized to inhibit IAPP-mediated disease, it was first established that Gal3 promotes IAPP aggregation. IAPP was mixed with recombinant human Gal3 and aggregation was measured with Western blots.

[1043] IAPP protein (Sigma-Aldrich #D2162) was diluted to a final concentration of 0.1 mg/ml by adding 10 mM sodium phosphate buffer, pH 7.4. Only 0.1 mg/mL IAPP, only 0.1 mg/mL rhGal3, or the combination of IAPP and rhGal3 were continuously stirred with a stir bar at room temperature, and aliquots were removed at 0, 0.5, 1, 2, 3, 4, and 5 hours of incubation and frozen at −20° C. for later analysis. To detect enhanced protein size seen in oligomers, samples were rapidly thawed at 37° C. and then 5 μL was loaded onto a 4-12% Criterion™ XT Bis-Tris Protein Gel (Bio-Rad #3450124), transferred to nitrocellulose (Amersham GE #10600001), and equal loading was confirmed with Ponceau Red staining. After the Ponceau Red was washed off, the nitrocellulose was blocked in 10% non-fat milk/TBS-Tween-20, and then incubated for 1 hour with I11 rabbit anti-amyloid oligomer primary antibody. After washing, the nitrocellulose was incubated for 1 hour with 1:5000 Donkey anti-rabbit HRP detection antibody (Jackson ImmunoResearch #711-035-152). After a final wash, bands were detected with a chemiluminescent substrate (1:1 mixture of Advansta Cat #R-03021-D10 and #R-03031-D10). Images were captured on an Azure imager.

[1044] IAPP protein (Sigma-Aldrich #D2162) was diluted to a final concentration of 0.1 mg/mL by adding 10 mM sodium phosphate buffer, pH 7.4. IAPP was incubated alone or with 100 μg/mL Gal3, and 100 μg/mL Gal3 alone was used as a control. The mixture was run on a Western blot with amyloid oligomer detected with the I11 antibody.

[1045] As seen in FIG. 9A, a ˜60 kDa band is observed for IAPP alone, indicating that this protein normally forms aggregates. The intensity of this band is increased when IAPP is mixed with Gal3 (FIG. 9B), indicating that more aggregation of IAPP occurs in the presence of Gal3.

[1046] FIG. 9C depicts samples of IAPP alone, Gal3 alone, or IAPP incubated with Gal3 at time points of 0, 0.5, 3, and 5 hours of incubation, showing that IAPP oligomerizes after 3 hours of incubation with Gal3. FIG. 9D is a quantification of the ˜60 kDa bands of FIG. 9C comparing the relative abundance of IAPP in each condition.

[1047] To identify anti-Gal3 antibodies with therapeutic potential, a screen of anti-Gal3 antibodies that block aggregation will be conducted. Anti-Gal3 antibodies or isotype controls will be co-incubated with 0.1 mg/mL IAPP with or without 0.1 mg/mL rhGal3, continuously stirring the mixture for up to 96 hours. Aggregation of IAPP will be detected by probing a Western blot with the I11 antibody. It is expected that antibodies that fully or partially block IAPP aggregation by at least 10% and those that do not affect it will be identified. Blockers can be sub-categorized further by epitope binning.

[1048] An ELISA was used to evaluate the binding of Gal3 to aggregated and unaggregated IAPP. To start the ELISA, coating solutions were prepared by diluting galectin-3 proteins (TrueBinding, QCB200349) (TrueBinding, QCB200352) (Biolegend, 599806) in separate volumes of PBS (Corning, 21-030-CM), each to a concentration of 10 μg/ml. Coating solutions were applied to a 96-well ELISA plate (Thermo Scientific, 44-2401-21) by adding 80 μl per well along the top row of the plate, four wells per protein, then serially diluting two-fold downwards in PBS. After incubating the plate at 4° C. O/N, the plate was washed with 300 μl PBST three times, followed by a blocking step in which 150 μl of 2% BSA in PBST was added to every well and incubated for an hour at RT with gentle rocking. The existing blocking solution was then discarded from the plate. IAPP solution for binding was prepared by diluting biotinylated aggregated IAPP in 2% BSA in PBST to a concentration of 10 μg/ml, then applied to the plate by adding 60 μl per well column-wise for three columns, one column for each galectin-3, then serially diluted two-fold length-wise rightwards in 2% BSA in PBST. The plate was incubated for an hour at RT with gentle rocking and then washed with 300 μl PBST three times. Afterward, Avidin-HRP (Biolegend, 405103) was diluted to 1:2000 in 2% BSA in PBST, then 25 μl was added to all the wells. The plate was incubated for an hour at RT with gentle rocking, then washed with 300 μl PBST three times. To develop the plate, 50 μl of ABTS (Life Technologies, 00-2024) substrate was added to each well, incubated until a sufficient signal was reached, then stopped with 25 μl of 1N HCl per well. The plate was read in a plate reader at an absorbance of 405 nm. Data was graphed using GraphPad Prism 8.0 software (GraphPad Software Inc).

[1049] FIG. 90 depicts the results of the ELISA assay examining binding of hGal3 to aggregated and unaggregated IAPP. As can be seen in FIG. 90, IAPP is a weak binder of hGal3. Aggregation of IAPP causes a minor increase in Gal3 binding affinity.

### Example 20: Gal3 Antibodies Block IAPP Aggregate-Induced Cell Toxicity

[1050] IAPP aggregates can cause pancreatic beta cell death. To identify Gal3 antibodies that reduce beta cell death induced by IAPP aggregates, it first will be established that Gal3 promotes IAPP-induced cell death. Apoptosis in human INS-1 832/13 (Sigma-Aldrich #SCC207) and mouse MIN6 (ATCC) beta cell lines will be compared after treatment with IAPP pre-incubated with or without Gal3.

[1051] 2×10⁵ cells will be grown overnight in a 96 well plate, and then cells will be stimulated with IAPP, IAPP pre-mixed with Gal3 to form aggregates, or Gal3 alone. Gal3 will be mixed on its own without IAPP as a control. 2-25 μL of pre-formed aggregates or control proteins will be taken out and incubated with the plated cells. After 8-48 hours, apoptosis will be measured by the Fluorometric Caspase 3 Assay Kit (Sigma-Aldrich #CASP3F) according to manufacturer's instructions and/or by flow cytometry using FITC Annexin V Apoptosis Detection kit with 7-AAD (Biolegend #640922). It is expected that cells incubated with the combination of Gal3 and IAPP will have at least 10% more death than cells incubated with IAPP or Gal3 alone.

[1052] To identify anti-Gal3 antibodies with therapeutic potential, a screen of anti-Gal3 antibodies that block cytotoxicity will be conducted. Various concentrations of antibodies will be incubated in the assays described above and attenuation of cell death will be assessed. Antibodies that block cytotoxicity by at least 10% will be identified. Blockers can be sub-categorized further by epitope binning.

### Example 21: Gal3 Antibodies Ameliorate IAPP-Induced Amyloidosis

[1053] Loss or dysfunction of pancreatic beta cells can lead to insulin and blood sugar dysregulation. IAPP aggregates are the major component of the cytotoxic amyloid deposits found in the pancreas of patients.

[1054] To identify anti-Gal3 antibodies that ameliorate disease caused by IAPP aggregates in vivo, toxic IAPP aggregates formed in vitro in the presence of Gal3 will be injected at different doses intra-peritoneally in mice. Blood sugar dysregulation will be monitored by standard glucose tolerance tests (GTT) and insulin tolerance tests (ITT assays). When dysregulation is evident, animals will be treated with Gal3 antibodies or remain untreated. It is expected that at least 10% improvement in GTT and ITT will be seen after treatment with antibodies compared to controls. Accumulation of IAPP aggregates in the pancreas will be assessed by IHC using Congo Red to stain aggregates. It is expected that at least a 10% reduction in the area of the sections that are positive for Congo Red will be seen.

[1055] In a second model of IAPP-mediated disease, RIPHAT mice (Jackson Labs, #008232) that express human islet amyloid polypeptide (h-IAPP) under the regulatory control of the rat insulin II promoter will be tested. Aged RIPHAT mice develop extracellular IAPP amyloid deposits associated with beta cell death and hyperglycemia. To test if anti-Gal3 antibodies can ameliorate disease caused by IAPP aggregates, aged mice will be treated with anti-Gal3 antibodies or left untreated. It is expected that at least 10% improvement in GTT and ITT will be seen after treatment with antibodies compared to controls. Accumulation of IAPP aggregates in the pancreas will be assessed by IHC, using Congo Red to stain aggregates. It is expected that at least a 10% reduction in the area of the sections that are positive for Congo Red will be seen.

### Example 22: Gal3 Antibodies Block Gal3-Induced Aggregation of SAA1

[1056] The Serum Amyloid Protein A (SAA) isoform-1 (SAA1) can aggregate, causing or exacerbating chronic inflammatory disorders such as rheumatoid diseases (e.g. arthritis, lupus), gastrointestinal diseases (e.g. Crohn's disease, ulcerative colitis), or persistent infections (e.g. tuberculosis, leprosy). The SAA isoform SAA2 does not tend to oligomerize and is not toxic. To test whether anti-Gal3 antibodies could be utilized to inhibit SAA amyloidosis, it will be first established that Gal3 promotes SAA aggregation. SAA (sequence similar to SAA2) or SAA1 will be mixed with recombinant human Gal3 and aggregation will be measured with Western and dot blots. Formation of fibrils (a class of aggregates) formation will be quantified using a Thioflavin T assay.

[1057] hSAA (ProSpecBio, #CYT-942) or hSAA1 (ProSpecBio, CYT-787) recombinant human protein will be mixed with continuous stirring at room temperature with or without Gal3 added. At 0 hours (immediately after mixing together), and at time points up to 363 hours, 2-10 μL aliquots will be removed and immediately frozen at −80° C. After all samples are collected, they will be analyzed by Western and dot blots.

[1058] To detect enhanced protein size seen in aggregates, samples will be rapidly thawed at 37° C. and then 2-5 μL will be loaded onto a 4-12% Criterion™ XT Bis-Tris Protein Gel (Bio-Rad #3450124), transferred to nitrocellulose (Amersham GE #10600001), and equal loading will be confirmed with Ponceau Red staining. After the Ponceau Red is washed off, the nitrocellulose will be blocked in 10% non-fat milk/TBS-Tween-20, then incubated for 1 hour with rabbit anti-SAA primary antibody (Abcam, #ab190801). After washing, the nitrocellulose will be incubated with Donkey anti-rabbit HRP detection antibody (Jackson ImmunoResearch #711-035-152). After a final wash, bands will be detected with a chemiluminescent substrate (1:1 mixture of Advansta #R-03021-D10 and #R-03031-D10). Images are captured on an Azure imager. SAA and SAA1 aggregates will be detected by their specific antibodies, but at a higher molecular weight on the gel than non-aggregated proteins. It is expected that Gal3 promotes the accumulation of higher molecular weight aggregates of SAA1, which are nearly undetectable when SAA1 is incubated alone.

[1059] In another method to detect aggregates, samples will be rapidly thawed at 37° C. and then 2-10 μL will be loaded onto a nitrocellulose membrane (1 membrane per primary) and air-dried for 1 hour at room temperature. Equal loading will be confirmed with Ponceau Red staining. After the Ponceau Red is washed off, the nitrocellulose will be blocked in 10% non-fat milk/TBS-Tween-20, and then incubated for 1 hour with either A11 anti-amyloid oligomer (Thermo-Fisher Scientific, #AHB0052), OC anti-amyloid oligomer (Sigma-Aldrich #AB2286) or anti-SAA primary antibodies (Abcam #ab190801). After washing, the nitrocellulose will be incubated for 1 hour with 1:5000 Donkey anti-rabbit HRP detection antibody (Jackson ImmunoResearch #711-035-152). After a final wash, dots will be detected with a chemiluminescent substrate (1:1 mixture of Advansta Cat #R-03021-D10 and #R-03031-D10). Images will be captured on an Azure imager and quantified. It is expected that Gal3 will increase the size of dots detected by A11 or OC by at least 10% compared to the same point where Gal3 is not added. It is expected that the SAA antibody, which serves as a loading control, will remain at the same level in all samples. This demonstrates that Gal3 promotes aggregation of SAA1.

[1060] When Thioflavin T binds to β-sheet-rich structures such as amyloid fibrils, it fluoresces at 485 nm. To measure fibrils, 20 μM of Thioflavin T will be mixed with 100 μM of hSAA (ProSpecBio, #CYT-942) or hSAA1 (ProSpecBio, CYT-787) recombinant human protein with or without 300 μM of rhGal3 in a final volume of 100 μL in a black 96-well plate. Controls include rhGal3 and Thioflavin T without SAA or SAA1 to ensure specific binding to amyloid fibrils. Thioflavin T incubated alone will also be included for background subtraction from final readings. Each plate will contain duplicate conditions. Two identical plates will be set up, one to be incubated at room temperature and one at 37° C. on a rotor shaking at 600 rpm. Fluorescence will be read at various time points up to 363 hours on a SpectraMax plate reader machine at excitation 450 nm and emission 485 nm. To quantify fibril formation, fluorescence at 37° C. minus background fluorescence will be calculated. Conditions that demonstrate increased fluorescence will indicate enhanced fibril formation. It is expected that Gal3 increases fluorescence by at least 10% when added, demonstrating that it promotes SAA1 fibril formation.

[1061] To identify anti-Gal3 antibodies with therapeutic potential, a screen of anti-Gal3 antibodies that block aggregation or fibril formation will be conducted. Time points demonstrating aggregation in the presence of Gal3 will be chosen from the Western blots, dot blots, and Thioflavin T assays. Various concentrations of antibodies will be incubated with the assays described above to detect antibodies that block aggregation or fibril formation. It is expected that antibodies that block SAA1 aggregation by at least 10% and those that do not affect aggregation will be identified. Blockers can be sub-categorized further by epitope binning.

### Example 23: Gal3 Antibodies Block SAA1 Aggregate-Induced Cell Toxicity

[1062] SAA1 aggregates can cause cell death, which can damage the organs they accumulate in and lead to chronic inflammatory disorders. To test whether anti-Gal3 antibodies could be utilized to inhibit SAA amyloidosis, it will be first established if SAA aggregates formed in the presence of Gal3 can lead to cell toxicity. Apoptosis in HEK293T cells will be compared after treatment with SAA and SAA1 peptides pre-incubated with or without Gal3.

[1063] 2×10⁵ HEK293T cells will be grown overnight in a 96 well plate, and then cells will be stimulated with 2-25 μL SAA1 alone, SAA1 pre-mixed with Gal3 to form aggregates, or Gal3 alone in serum-free DMEM media. After 6 hours, cytotoxicity will be measured by lactate dehydrogenase (LDH) release according to manufacturer's instructions using the CytoTox 96® Non-Radioactive Cytotoxicity Assay (Promega #G1780). Minimal apoptosis will be observed with SAA, SAA plus Gal3, or SAA1 alone. It is expected that SAA1 pre-incubated with Gal3 will increase apoptosis by at least 10%.

[1064] To identify anti-Gal3 antibodies with therapeutic potential, a screen of anti-Gal3 antibodies that block cytotoxicity will be conducted. Various concentrations of antibodies will be incubated in the assays described above and attenuation of cell death will be assessed. It is expected that antibodies that block cytotoxicity by at least 10% and those that do not affect cytotoxicity will be identified. Blockers can be sub-categorized further by epitope binning.

### Example 24: Gal3 Antibodies Ameliorate Chronic Inflammation in Autoimmune Disease

[1065] To test if anti-Gal3 antibodies can attenuate inflammatory disease, mouse models of rheumatoid disease and inflammatory bowel disease (IBD) will be treated.

[1066] In a model of rheumatoid arthritis, wild-type and IL1ra knockout mice (Jackson Labs #25391376) are injected with SAA that was aggregated in vitro and 2% AgNO3. Mice will then be treated with anti-Gal3 antibodies or isotype controls. Joint inflammation will be quantified by arthritic score based on visual assessment or caliper measurement. Systemic inflammation will be quantified by the levels of TNFα, IL-1β, IL-6, CRP or other pro-inflammatory biomarkers in the plasma. Aggregate deposition will be quantified in spleen, liver, kidneys, heart, thyroid glands, intestines, adrenal glands or other organs using Congo Red. It is expected that mice that receive SAA aggregates will have increased symptoms of disease and evidence of pathophysiology not seen in animals that do not received aggregates. It is expected that in animals that will receive the SAA aggregates, Gal3 antibody-treated animals will have at least a 10% reduction in arthritic score compared to isotype controls. It is expected that Gal3 antibody-treated animals will have at least a 10% reduction in at least one biomarker of inflammation compared to isotype controls. It is expected that SAA aggregate deposition will be decreased by at least 10% in at least one organ compared to isotype controls.

[1067] In a model of IBD, SAA aggregates will be detected in IL-2−/− mice before symptom development and it is expected that the level of aggregates will correlate to severity of disease. To test the effect of Gal3 therapeutic antibodies, wild-type, IL-2+/− and IL-2−/− mice (Jackson Labs #002229) will be injected with Gal3 antibodies or isotype controls. IBD will be quantified by scoring IHC sections for leukocyte infiltration and epithelial hyperplasia. Systemic inflammation will be quantified by the levels of TNFα, IL-1β, IL-6, CRP or other pro-inflammatory biomarkers in the plasma. Aggregate deposition will be quantified in spleen, liver, kidneys, heart, thyroid glands, intestines, adrenal glands or other organs using Congo Red. It is expected that Gal3 antibody-treated animals will have at least a 10% reduction in IBD score compared to isotype controls. It is expected that Gal3 antibody-treated animals will have at least a 10% reduction in at least one biomarker of inflammation compared to isotype controls. It is expected that SAA aggregate deposition will be decreased by at least 10% in at least one organ compared to isotype controls.

[1068] In a second model of IBD, IL-2+/− mice will be left untreated or injected with SAA that was aggregated in vitro to enhance SAA-induced symptom development. To test the effect of Gal3 therapeutic antibodies, untreated or injected mice will be treated with Gal3 antibodies or isotype controls. IBD will be quantified by scoring IHC sections for leukocyte infiltration and epithelial hyperplasia. Systemic inflammation will be quantified by the levels of TNFα, IL-1β, IL-6, CRP or other pro-inflammatory biomarkers in the plasma. Aggregate deposition will be quantified in spleen, liver, kidneys, heart, thyroid glands, intestines, adrenal glands or other organs using Congo Red. It is expected that Gal3 antibody-treated animals will have at least a 10% reduction in IBD score compared to isotype controls. It is expected that Gal3 antibody-treated animals will have at least a 10% reduction in at least one biomarker of inflammation compared to isotype controls. It is expected that SAA aggregate deposition will be decreased by at least 10% in at least one organ compared to isotype controls.

### Example 25: Gal3 Antibodies Block Gal3-Induced Aggregation of p53

[1069] Misfolding and aggregation of the tumor suppressor p53 can play a role in cancer development. To test whether anti-Gal3 antibodies could be utilized to inhibit cancer, it will be first established that Gal3 promotes p53 aggregation. p53 will be mixed with recombinant human Gal3 and aggregation will be measured with Western and dot blots. Formation of fibrils (a class of aggregates) formation will be quantified using a Thioflavin T assay.

[1070] Recombinant p53 human protein (Biorbyt #orb418963) will be mixed with continuous stirring at room temperature with or without Gal3 added. At 0 hours (immediately after mixing together), and at time points up to 363 hours, 2-10 μL aliquots will be removed and immediately frozen at −80° C. After all samples are collected, they will be analyzed by Western and dot blots.

[1071] To detect enhanced protein size seen in aggregates, samples will be rapidly thawed at 37° C. and then 2-5 μL will be loaded onto a 4-12% Criterion™ XT Bis-Tris Protein Gel (Bio-Rad #3450124), transferred to nitrocellulose (Amersham GE #10600001), and equal loading will be confirmed with Ponceau Red staining. After the Ponceau Red is washed off, the nitrocellulose will be blocked in 10% non-fat milk/TBS-Tween-20, and then incubated for 1 hour with rabbit anti-p53 primary antibody (R&D Systems MAB1355). After washing, the nitrocellulose will be incubated with anti-mouse HRP detection antibody (Abcam #ab6789). After a final wash, bands will be detected with a chemiluminescent substrate (1:1 mixture of Advansta #R-03021-D10 and #R-03031-D10). Images will be captured on an Azure imager. p53 aggregates will be detected by their specific antibodies, but at a higher molecular weight on the gel than non-aggregated proteins. It is expected that Gal3 promotes the accumulation of higher molecular weight aggregates of p53, which are nearly undetectable when p53 is incubated alone.

[1072] In another method to detect aggregates, samples will be rapidly thawed at 37° C. and then 2-10 μL will be loaded onto a nitrocellulose membrane (1 membrane per primary) and air-dried for 1 hour at room temperature. Equal loading will be confirmed with Ponceau Red staining. After the Ponceau Red is washed off, the nitrocellulose will be blocked in 10% non-fat milk/TBS-Tween-20, then incubated for 1 hour with either A11 anti-amyloid oligomer (Thermo-Fisher Scientific, #AHB0052), OC anti-amyloid oligomer (Sigma-Aldrich #AB2286) or anti-p53 primary antibodies (R&D Systems MAB1355). After washing, the nitrocellulose will be incubated for 1 hour with 1:5000 Donkey anti-rabbit HRP detection antibody (Jackson ImmunoResearch #711-035-152) or anti-mouse HRP detection antibody Abcam #ab6789). After a final wash, dots will be detected with a chemiluminescent substrate (1:1 mixture of Advansta Cat #R-03021-D10 and #R-03031-D10). Images will be captured on an Azure imager and quantified. It is expected that Gal3 increases the size of dots detected by A11 or OC by at least 10% compared to the same point where Gal3 is not added. It is expected that the p53 antibody, which serves as a loading control, remains at the same level in all samples. This demonstrates that Gal3 promotes aggregation of p53.

[1073] When Thioflavin T binds to β-sheet-rich structures such as amyloid fibrils, it fluoresces at 485 nm. To measure fibrils, 20 μM of Thioflavin T will be mixed with 100 μM of p53 recombinant human protein with or without 300 μM of rhGal3 in a final volume of 100 μL in a black 96-well plate. Controls will include Gal3 and Thioflavin T without p53 to ensure specific binding to amyloid fibrils. Thioflavin T incubated alone will also be included for background subtraction from final readings. Each plate will contain duplicate conditions. Two identical plates will be set up, one to be incubated at room temperature and one at 37° C. on a rotor shaking at 600 rpm. Fluorescence will be read at various time points up to 363 hours on a SpectraMax plate reader machine at excitation 450 nm and emission 485 nm. To quantify fibril formation, fluorescence at 37° C. minus background fluorescence will be calculated. Conditions that demonstrate increased fluorescence will indicate enhanced fibril formation. It is expected that Gal3 increases fluorescence by at least 10% when added, demonstrating that it promotes p53 fibril formation.

[1074] To identify anti-Gal3 antibodies with therapeutic potential, a screen of anti-Gal3 antibodies that block aggregation or fibril formation will be conducted. Time points demonstrating aggregation in the presence of Gal3 will be chosen from the Western blots, dot blots, and Thioflavin T assays. Various concentrations of antibodies will be incubated with the assays described above to detect antibodies that block aggregation or fibril formation. It is expected that antibodies that block p53 aggregation by at least 10% and those that do not affect aggregation will be identified. Blockers can be sub-categorized further by epitope binning.

### Example 26: Gal3 Antibodies Block p53 Aggregate-Induced Cell Toxicity

[1075] p53 aggregates taken up by cells can seed the misfolding and inactivation of cytoplasmic p53, leading to cell death. To identify Gal3 antibodies that promote cancer cell death opposed by p53 aggregation, we first establish that Gal3 reduces p53-induced cell death. A variety in cancer cell lines, including but not limited to SH-SY5Y neuroblastoma, MCF7 and MD-MBA231 breast cancer cells, will be assessed.

[1076] Cells will be grown overnight in a 96 well plate, and then cells will be stimulated with p53, p53 pre-mixed with Gal3 to form aggregates, or Gal3 alone. Gal3 will be mixed on its own without p53 as a control. 2-25 μL will be taken out and incubated with the plated cells. After 8-48 hours, viability will be measured by the CYQUANT MTT assay (Thermo-Fisher #V13154), according to the manufacturer's instructions. The absorbance at 560 nm and background scattering at 690 nm will be measured in a SpectraMax plate reader (Molecular Devices). The absorbance values at 560 nm will be used to calculate the viability of cells in comparison to buffer control. It is expected that viability will be reduced by at least 10% when p53 aggregated with Gal3 is added compared to p53 alone in an unaggregated form or Gal3 alone.

[1077] To identify anti-Gal3 antibodies with therapeutic potential, a screen of anti-Gal3 antibodies that promote cytotoxicity will be conducted. Various concentrations of antibodies will be incubated in the assays described above and promotion of cell death will be assessed. It is expected that antibodies that promote cytotoxicity by at least 10% will be identified. These antibodies can be sub-categorized further by epitope binning.

### Example 27: Anti-Gal3 Antibodies for Use in the Treatment of a Proteopathy or Amyloidosis

[1078] Patients present with a proteopathy, such as an amyloid proteopathy, or amyloidosis, such as a synucleinopathy, Parkinson's disease, dementia with Lewy bodies, multiple system atrophy, tauopathy, Alzheimer's disease, progressive supranuclear palsy, corticobasal degeneration, Pick's disease, TDP-43 proteopathy, amyotrophic lateral sclerosis, frontotemporal lobar degeneration, TTR amyloidosis, cardiac amyloidosis, uromodulin-associated kidney disease, IAPP amyloidosis, SAA amyloidosis, rheumatoid arthritis, inflammatory arthritis, spondyloarthropathies, juvenile idiopathic arthritis, ankylosing spondylitis, psoriatic arthritis, inflammatory bowel disease, ulcerative colitis, Crohn's disease, celiac disease, vasculitis, sarcoidosis, familial Mediterranean fever, tumor necrosis factor receptor-associated periodic syndrome (TRAPS), cancer, aging promoted by amyloid aggregation, or diseases caused by dysfunction of α-synuclein, tau protein, TDP-43, transthyretin, uromodulin, IAPP, SAA, or p53. One or more anti-Gal3 antibodies or binding fragments thereof disclosed herein are administered to the patients enterally, orally, intranasally, parenterally, intracranially, subcutaneously, intramuscularly, intradermally, or intravenously.

[1079] The anti-Gal3 antibodies or binding fragments thereof are administered as doses in at an amount of 1 ng (or in the alternative: 0.1, 10, 100, 1000 ng, or 1, 10, 50, 100, 200, 300, 400, 500, 600, 700, 800, 900, 1000 μg, or 1, 10, 100, 200, 300, 400, 500, 600, 700, 800, 900, 1000 mg, or any amount within a range defined by any two of the aforementioned amounts, or any other amount appropriate for optimal efficacy in humans). The doses are administered every 1 day (or in the alternative: every 2, 3, 4, 5, 6, 7, 8, 9, 10, 11, 12, 24, 36, or 48 days or any time within a range defined by any two of the aforementioned times).

[1080] The anti-Gal3 antibody is repeatedly administered until the patient experiences a reduction or amelioration of the proteopathy or amyloidosis. The reduction or amelioration of the proteopathy or amyloidosis may be detected through diagnostic methods generally known in the art, including but not limited to a biopsy, blood or urine test, echocardiogram, or technetium pyrophosphate scintigraphy. The reduction or amelioration of the proteopathy or amyloidosis may be reduced by at least 5% (or in the alternative: 10%, 15%, 20%, 25%, 30%, 35%, 40%, 45%, 50%, 55%, 60%, 65%, 70%, 75%, 80%, 85%, 90%, 95%, or 99%) after the administering step relative to the proteopathy or amyloidosis prior to the administering step, as assessed by a qualified individual.

### Example 28: Gal3 Promotes Apolipoprotein E Oligomerization

[1081] Gal3 was tested for its ability to promote oligomerization of apolipoprotein E (APOE). Recombinant forms of different polymorphic alleles of APOE (APO-E2, APO-E3, and APO-E4) were incubated with Gal3 at room temperature for 0, 1, 2, 3, 4, 5, or 24 hours. APOE only and Gal3 only preparations were used as control.

[1082] Dot blots of the APOE/Gal3 mixtures and controls were performed and probed with A11 antibody and anti-Gal3804 antibody. FIG. 26A-B show that for APOE alleles APO-E2 and APO-E3, no oligomers were detected. However, FIG. 26C shows that Gal3 promoted APO-E4 oligomerization at the time points tested as indicated by positive signal when probed with A11.

[1083] An ELISA was also used to detect Gal3 binding to APOE-4. Prior to the ELISA, human APOE-4 was aggregated by multiple days of stirring, biotinylated using EZ Link Sulfo-NHS-LC-Biotin (ThermoFisher Scientific, A39257), and desalted with a Zeba Spin Desalting Column (ThermoFisher Scientific, 89882) following the manufacturers' instructions. To start the ELISA, coating solutions were prepared by diluting galectin-3 proteins (TrueBinding, QCB200349) (TrueBinding, QCB200352) (Biolegend, 599806) in separate volumes of PBS (Corning, 21-030-CM), each to a concentration of 4 μg/ml. Coating solutions were applied to a 96-well ELISA plate (Thermo Scientific, 44-2401-21) by adding 80 μl per well along the top row of the plate, four wells per protein, then serially diluting two-fold downwards in PBS. After incubating the plate at 4° C. O/N, the plate was washed with 300 μl PBST three times, followed by a blocking step in which 150 μl of 2% BSA in PBST was added to every well and incubated for an hour at RT with gentle rocking. The existing blocking solution was then discarded from the plate. APOE-4 solution for binding was prepared by diluting biotinylated aggregated APOE-4 in 2% BSA in PBST to a concentration of 4 μg/ml, then applied to the plate by adding 60 μl per well column-wise for three columns, one column for each galectin-3, then serially diluted two-fold length-wise rightwards in 2% BSA in PBST. The plate was incubated for an hour at RT with gentle rocking and then washed with 300 μl PBST three times. Afterward, Avidin-HRP (Biolegend, 405103) was diluted to 1:2000 in 2% BSA in PBST, then 25 μl was added to all the wells. The plate was incubated for an hour at RT with gentle rocking, then washed with 300 μl PBST three times. To develop the plate, 50 μl of ABTS (Life Technologies, 00-2024) substrate was added to each well, incubated until a sufficient signal was reached, then stopped with 25 μl of 1N HCl per well. The plate was read in a plate reader at an absorbance of 405 nm. Data was graphed using GraphPad Prism 8.0 software (GraphPad Software Inc).

[1084] FIG. 76 depicts the results of the ELISA assay examining binding of hGal3 to aggregated ApoE4 protein. As can be seen in FIG. 76, no binding between aggregated APOE-4 and Gal3 was observed.

### Example 29: Anti-Gal3 Antibodies Degrade Toxic Apolipoprotein E Oligomers

[1085] The exemplary anti-Gal3 antibody TB006 was tested for its ability to degrade APOE-4 oligomers. APOE-4/Gal3 mixtures were prepared, with APOE-4 only as control. The APOE-4 peptide was diluted to final concentration 0.1 mg/ml by adding 10 mM sodium phosphate buffer, pH 7.4. To investigate the effect of recombinant human Gal-3 (rhGal-3) on aggregation of APOE-4, 100 μg/ml of APOE-4 peptide was mixed rhGal-3 protein (100 μg/ml). The solution was continuously stirred during the aggregation time course using a stir bar for 24 hrs at RT. The aggregation profile of APOE4 peptide with out and with rhGal-3 probed with A11 & APOE4 sequence dependent antibody (Syn1) was then determined. These were then combined with TB006 (or MOPC21 as isotype control) at 0, 3, 10, or 100 μg of antibody, and incubated with the antibody for 0, 1, 2, or 3 hours at room temperature.

[1086] After incubating with respective secondary antibodies for 1 h, images were developed using Azure image developer.

[1087] As shown in FIG. 27A, TB006 showed a dose-dependent ability to degrade APO-E4 oligomers in the APO-E4/Gal3 mixtures whereas MOPC21 control had no effect.

[1088] FIG. 27B shows the 3 hour time point of FIG. 27B. FIG. 27C is the quantification of the TB006-treated 3 hour time points of FIG. 27B based on signal intensity.

### Example 30: Gal3 Promotes Prion Protein Oligomerization

[1089] Gal3 was tested for its ability to promote oligomerization of prion protein. Recombinant prion protein was incubated with Gal3 at room temperature for 0, 0.5, 1, 2, 3, 4, or 5 hours. Prion protein only and Gal3 only preparations were used as control.

[1090] Dot blots of the prion protein/Gal3 mixtures and controls were performed and probed with A11 antibody and prion protein (PrP)-specific antibody. FIG. 25 shows that prion protein incubated with Gal3 formed oligomers at the time points tested as indicated by positive signal when probed with A11.

[1091] Gal3 binding to aggregated prion protein was also tested using an ELISA. Prior to the ELISA, human prion protein was aggregated by multiple days of stirring, biotinylated using EZ Link Sulfo-NHS-LC-Biotin (ThermoFisher Scientific, A39257), and desalted with a Zeba Spin Desalting Column (ThermoFisher Scientific, 89882) following the manufacturers' instructions.

[1092] To start the ELISA, coating solutions were prepared by diluting galectin-3 protein (TrueBinding, QCB210019) (TrueBinding, QCB200377) (Biolegend, 599806) in separate volumes of PBS to a concentration of 4 μg/ml. Coating solutions were applied to a 96-well ELISA plate (Thermo Scientific, 44-2401-21) by adding 80 μl per well along the top row of the plate, four wells per protein, then serially diluting two-fold downwards in PBS. After incubating the plate at 4° C. O/N, the plate was washed with 300 μl PBST three times, followed by a blocking step in which 150 μl of 2% BSA in PBST was added to every well and incubated for an hour at RT with gentle rocking. The existing blocking solution was then discarded from the plate. Prion protein solution for binding was prepared by diluting biotinylated aggregated prion protein in 2% BSA in PBST to a concentration of 4 μg/ml, then applied to the plate by adding 60 μl per well column-wise for three columns, one column for each galectin-3, then serially diluted two-fold length-wise rightwards in 2% BSA in PBST. The plate was incubated for an hour at RT with gentle rocking and then washed with 300 μl PBST three times. Afterward, Avidin-HRP (Biolegend, 405103) was diluted to 1:2000 in 2% BSA in PBST, then 25 μl was added to all the wells. The plate was incubated for an hour at RT with gentle rocking, then washed with 300 μl PBST three times. To develop the plate, 50 μl of ABTS (Life Technologies, 00-2024) substrate was added to each well, incubated until a sufficient signal was reached, then stopped with 25 μl of 1N HCl per well. The plate was read in a plate reader at an absorbance of 405 nm. Data was graphed using GraphPad Prism 8.0 software (GraphPad Software Inc).

[1093] FIG. 80 depicts the results of the ELISA assay examining binding of hGal3 to aggregated prion protein. As can be seen in FIG. 80, hGal3 demonstrates strong binding to aggregated prion protein even at diminishing concentrations of aggregated prion protein or hGal3.

[1094] An ELISA was used to evaluate the blocking efficacy of various antibodies against hGal3 binding to aggregated prion protein. Prior to the ELISA, human prion protein was aggregated by multiple days of stirring, biotinylated using EZ Link Sulfo-NHS-LC-Biotin (ThermoFisher Scientific, A39257), and desalted with a Zeba Spin Desalting Column (ThermoFisher Scientific, 89882) following the manufacturers' instructions.

[1095] Human Galectin-3 (Gal3) protein (TrueBinding, QCB200377) was diluted in PBS to a concentration of 10 μg/ml and coated a 96-well ELISA plate by applying 35 μl to each well. After incubating the plate at 4° C. O/N, the plate was washed three times with 300 μl PBST. The plate was then blocked for an hour with 150 μl of 2% BSA in PBST at RT with gentle rocking. Thereafter, the 2% BSA in PBST was discarded and 30 μl of TB001 (TrueBinding, QC190118), TB006 (TrueBinding, QC200208), several 20H5 (TrueBinding, various QC #), or Synagis hIgG4 Isotype (TrueBinding, QC190234) (3-fold serial dilutions beginning at 10 μg/ml) in 2% BSA in PBST was added to the wells, immediately followed by the addition of 30 μl of 1 μg/ml of biotinylated prion protein in 2% BSA in PBST. The plate was incubated for an hour at RT with gentle rocking and then washed three times with 300 μl PBST. Thereafter, Avidin HRP (Biolegend, 405103) was diluted in 2% BSA in PBST (1:2000 dilution) and 25 μl was added to the wells. The plate was incubated at RT for an hour with gentle rocking and washed three times with 300 μl PBST. 50 μl of ABTS (Life Technologies, 00-2024) was added to each well to develop, then the plate was read using a plate reader at an absorbance of 405 nm. Data was graphed using GraphPad Prism 8.0 software (GraphPad Software Inc).

[1096] FIG. 81 depicts the results of the ELISA assay examining blocking efficacy of various antibodies against binding of hGal3 to aggregated prion protein. As can be seen in FIG. 81, various antibodies demonstrated significant blocking of hGal3 binding to aggregated prion protein even at diminishing concentrations of aggregated prion protein or hGal3.

### Example 31: Gal3 Promotes Neurofilament Light (NFL) Oligomerization

[1097] Gal3 was tested for its ability to promote oligomerization of neurofilament light (NFL) protein. Recombinant NFL was incubated with Gal3 at room temperature for 0, 1, 2, 3, 4, 5, or 24 hours. NFL only and Gal3 only preparations were used as control.

[1098] A dot blot of the NFL/Gal3 mixtures and controls were performed and probed with A11 antibody. FIG. 29A-B depicts promotion of aggregation of neurofilament light (NFL) protein by Gal3 as detected by dot blot.

[1099] To test whether anti-Gal3 antibodies could be utilized to inhibit proteopathies, it was first established using an ELISA that Gal3 is involved in the formation of aggregated NFL. Prior to the ELISA, human NFL was aggregated by multiple days of stirring, biotinylated using EZ Link Sulfo-NHS-LC-Biotin (ThermoFisher Scientific, A39257), and desalted with a Zeba Spin Desalting Column (ThermoFisher Scientific, 89882) following the manufacturers' instructions.

[1100] To start the ELISA, coating solutions were prepared by diluting galectin-3 protein (TrueBinding, QCB210019) (TrueBinding, QCB200377) (Biolegend, 599806) in separate volumes of PBS to a concentration of 4 μg/ml. Coating solutions were applied to a 96-well ELISA plate (Thermo Scientific, 44-2401-21) by adding 80 μl per well along the top row of the plate, four wells per protein, then serially diluting two-fold downwards in PBS. After incubating the plate at 4° C. O/N, the plate was washed with 300 μl PBST three times, followed by a blocking step in which 150 μl of 2% BSA in PBST was added to every well and incubated for an hour at RT with gentle rocking. The existing blocking solution was then discarded from the plate. NFL solution for binding was prepared by diluting biotinylated aggregated NFL in 2% BSA in PBST to a concentration of 4 μg/ml, then applied to the plate by adding 60 μl per well column-wise for three columns, one column for each galectin-3, then serially diluted two-fold length-wise rightwards in 2% BSA in PBST. The plate was incubated for an hour at RT with gentle rocking and then washed with 300 μl PBST three times. Afterward, Avidin-HRP (Biolegend, 405103) was diluted to 1:2000 in 2% BSA in PBST, then 25 μl was added to all the wells. The plate was incubated for an hour at RT with gentle rocking, then washed with 300 μl PBST three times. To develop the plate, 50 μl of ABTS (Life Technologies, 00-2024) substrate was added to each well, incubated until a sufficient signal was reached, then stopped with 25 μl of 1N HCl per well. The plate was read in a plate reader at an absorbance of 405 nm. Data was graphed using GraphPad Prism 8.0 software (GraphPad Software Inc).

[1101] FIG. 82 depicts the results of the ELISA assay examining binding of hGal3 to aggregated NFL. As can be seen in FIG. 82, weak binding of hGal3 to aggregated NFL was observed.

### Example 32: Gal3 Promotes Aggregation of Aβ42

[1102] Deposition of Aβ42 plaques is a characteristic hallmark of Alzheimer's disease and cerebral amyloid angiopathy (CAA). To test whether anti-Gal3 antibodies could be utilized to inhibit Alzheimer's disease or CAA, it was first established that Gal3 promotes Aβ42 aggregation.

[1103] To test whether anti-Gal3 antibodies could be utilized to inhibit proteopathies, it was first established using dot blot that Gal3 is involved in the formation of oligomerized Aβ42.1 mg of lyophilized Aβ42 peptide (r-peptide) was resuspended in 90 μl of 100 mM NaOH and incubated for 10 minutes. The solution was then diluted to final concentration 0.1 mg/ml by adding 100 mM sodium phosphate buffer, pH 7.4. Synthetic Aβ42 peptide was then mixed with rhGal-3 protein, and incubated for 1 hr at RT. After 1 hour, different concentrations of hTB001 and hTB006Ab were added and the solution was incubated for 5 hours at RT. 2 μl of each sample was pipetted onto a Whatman nitrocellulose membrane at the appropriate time points (time 0-5 hr) for a dot blot and probed with antibody A11. In order to confirm the Aβ42, the membrane was also probed with antibody 6E10. After incubating with respective secondary antibodies for 1 h, images were developed using Azure image developer.

[1104] As can be seen in FIG. 31, rhGal-3 induces oligomerization of Aβ42. FIG. 31A-D depict degradation of toxic Aβ42 oligomers as detected by dot blot. FIG. 31A depicts 24 hour time course degradation of toxic Aβ42 oligomers by hTB006 probed with A11 and 6E10 antibody. FIG. 31B depicts quantification of Aβ42 oligomer degradation over the 24 hour time course. FIG. 31C depicts 5 hour time course degradation of toxic Aβ42 oligomers by hTB006 probed with A11 and 6E10 antibody. FIG. 31D depicts quantification of the effect of different concentrations of hTB006 on Gal-3 induced Aβ42 oligomers.

[1105] To determine whether oligomerized Aβ42 binds hGal3, Gal3 binding to oligomerized Aβ2 was also tested using an Elisa. Prior to the ELISA, human prion protein was aggregated by multiple days of stirring, biotinylated using EZ Link Sulfo-NHS-LC-Biotin (ThermoFisher Scientific, A39257), and desalted with a Zeba Spin Desalting Column (ThermoFisher Scientific, 89882) following the manufacturers' instructions.

[1106] To start the ELISA, coating solutions were prepared by diluting galectin-3 protein (TrueBinding, QCB210019) (TrueBinding, QCB200377) (Biolegend, 599806) in separate volumes of PBS to a concentration of 4 μg/ml. Coating solutions were applied to a 96-well ELISA plate (Thermo Scientific, 44-2401-21) by adding 80 μl per well along the top row of the plate, four wells per protein, then serially diluting two-fold downwards in PBS. After incubating the plate at 4° C. O/N, the plate was washed with 300 μl PBST three times, followed by a blocking step in which 150 μl of 2% BSA in PBST was added to every well and incubated for an hour at RT with gentle rocking. The existing blocking solution was then discarded from the plate. Prion protein solution for binding was prepared by diluting biotinylated aggregated Aβ42 in 2% BSA in PBST to a concentration of 4 μg/ml, then applied to the plate by adding 60 μl per well column-wise for three columns, one column for each galectin-3, then serially diluted two-fold length-wise rightwards in 2% BSA in PBST. The plate was incubated for an hour at RT with gentle rocking and then washed with 300 μl PBST three times. Afterward, Avidin-HRP (Biolegend, 405103) was diluted to 1:2000 in 2% BSA in PBST, then 25 μl was added to all the wells. The plate was incubated for an hour at RT with gentle rocking, then washed with 300 μl PBST three times. To develop the plate, 50 μl of ABTS (Life Technologies, 00-2024) substrate was added to each well, incubated until a sufficient signal was reached, then stopped with 25 μl of 1N HCl per well. The plate was read in a plate reader at an absorbance of 405 nm. Data was graphed using GraphPad Prism 8.0 software (GraphPad Software Inc).

[1107] FIG. 69 depicts the results of the ELISA assay examining binding of hGal3 to aggregated Aβ42 protein. As can be seen in FIG. 69, hGal3 demonstrates moderate binding to Aβ42 even at diminishing concentrations of Aβ42 or hGal3.

### Example 33: Gal3 Promotes Aggregation of Aβ40

[1108] Deposition of Aβ40 plaques is a late stage characteristic hallmark of Alzheimer's disease and cerebral amyloid angiopathy (CAA). To test whether anti-Gal3 antibodies could be utilized to inhibit Alzheimer's disease or CAA, it was first established that Gal3 promotes Aβ40 aggregation.

[1109] To determine whether oligomerized Aβ40 binds hGal3, Gal3 binding to oligomerized Aβ40 was tested using a dot blot. 1 mg of lyophilized Aβ40 peptide was resuspended in 90 μl of 100 mM NaOH and incubated for 10 minutes. The solution was then diluted to final concentration 0.1 mg/ml by adding 100 mM sodium phosphate buffer, pH 7.4. Synthetic Aβ40 peptide was then mixed with rhGal-3 protein, and incubated for 1 hr at RT. After 1 hour, different concentrations of hTB001 and hTB006Ab were added and the solution was incubated for 5 hours at RT. 2 μl of each sample was pipetted onto a Whatman nitrocellulose membrane at the appropriate time points (time 0-5 hr) for a dot blot and probed with antibody A11. In order to confirm the Aβ40, the membrane was also probed with antibody 6E10. After incubating with respective secondary antibodies for 1 h, images were developed using Azure image developer.

[1110] As can be seen in FIG. 30, rhGal-3 induces oligomerization of A340. FIG. 30A-C depict oligomerization of Aβ40 as detected by dot blot. FIG. 30A depicts 24 hour time course oligomerization of Aβ40 oligomers probed with A11 antibody. FIG. 30B depicts 24 hour time course oligomerization of Aβ40 oligomers probed with antibody 6E10. FIG. 30C depicts 24 hour time course oligomerization of Aβ40 oligomers probed with Gal3 sequence 804 antibody.

[1111] To determine whether oligomerized Aβ40 binds hGal3, Gal3 binding to oligomerized Aβ0 was also tested using an Elisa. Prior to the ELISA, human prion protein was aggregated by multiple days of stirring, biotinylated using EZ Link Sulfo-NHS-LC-Biotin (ThermoFisher Scientific, A39257), and desalted with a Zeba Spin Desalting Column (ThermoFisher Scientific, 89882) following the manufacturers' instructions.

[1112] To start the ELISA, coating solutions were prepared by diluting galectin-3 protein (TrueBinding, QCB210019) (TrueBinding, QCB200377) (Biolegend, 599806) in separate volumes of PBS to a concentration of 4 μg/ml. Coating solutions were applied to a 96-well ELISA plate (Thermo Scientific, 44-2401-21) by adding 80 μl per well along the top row of the plate, four wells per protein, then serially diluting two-fold downwards in PBS. After incubating the plate at 4° C. O/N, the plate was washed with 300 μl PBST three times, followed by a blocking step in which 150 μl of 2% BSA in PBST was added to every well and incubated for an hour at RT with gentle rocking. The existing blocking solution was then discarded from the plate. Prion protein solution for binding was prepared by diluting biotinylated aggregated Aβ40 in 2% BSA in PBST to a concentration of 4 μg/ml, then applied to the plate by adding 60 μl per well column-wise for three columns, one column for each galectin-3, then serially diluted two-fold length-wise rightwards in 2% BSA in PBST. The plate was incubated for an hour at RT with gentle rocking and then washed with 300 μl PBST three times. Afterward, Avidin-HRP (Biolegend, 405103) was diluted to 1:2000 in 2% BSA in PBST, then 25 μl was added to all the wells. The plate was incubated for an hour at RT with gentle rocking, then washed with 300 μl PBST three times. To develop the plate, 50 μl of ABTS (Life Technologies, 00-2024) substrate was added to each well, incubated until a sufficient signal was reached, then stopped with 25 μl of 1N HCl per well. The plate was read in a plate reader at an absorbance of 405 nm. Data was graphed using GraphPad Prism 8.0 software (GraphPad Software Inc).

[1113] FIG. 70 depicts the results of the ELISA assay examining binding of hGal3 to aggregated Aβ40. As can be seen in FIG. 69, hGal3 demonstrates moderate binding to Aβ40 even at diminishing concentrations of Aβ40 or hGal3.

### Example 34: Gal3 Antibodies Block Gal3 Binding to Aβ40

[1114] An ELISA was performed to establish determine the blocking efficacy of various antibodies against hGal3 binding to Aβ40. Prior to the ELISA, human amyloid-beta 40 (Aβ340) was aggregated by multiple days of stirring, biotinylated using EZ Link Sulfo-NHS-LC-Biotin (ThermoFisher Scientific, A39257), and desalted with a Zeba Spin Desalting Column (ThermoFisher Scientific, 89882) following the manufacturers' instructions.

[1115] Human Galectin-3 (Gal3) protein (TrueBinding, QCB200377) was diluted in PBS to a concentration of 4 μg/ml and coated a 96-well ELISA plate by applying 35 μl to each well. After incubating the plate at 4° C. O/N, the plate was washed three times with 300 μl PBST. The plate was then blocked for an hour with 150 μl of 2% BSA in PBST at RT with gentle rocking. Thereafter, the 2% BSA in PBST was discarded and 30 μl of TB001 (TrueBinding, QC190118), TB006 (TrueBinding, QC200208), several 20H5 (TrueBinding, various QC #), or Synagis hIgG4 Isotype (TrueBinding, QC190234) (3-fold serial dilutions beginning at 10 μg/ml) in 2% BSA in PBST was added to the wells, immediately followed by the addition of 30 μl of 1 μg/ml of biotinylated Aβ40 in 2% BSA in PBST. The plate was incubated for an hour at RT with gentle rocking and then washed three times with 300 μl PBST. Thereafter, Avidin HRP (Biolegend, 405103) was diluted in 2% BSA in PBST (1:2000 dilution) and 25 μl was added to the wells. The plate was incubated at RT for an hour with gentle rocking and washed three times with 300 μl PBST. 50 μl of ABTS (Life Technologies, 00-2024) was added to each well to develop, then the plate was read using a plate reader at an absorbance of 405 nm. Data was graphed using GraphPad Prism 8.0 software (GraphPad Software Inc).

[1116] FIG. 71 depicts the results of the ELISA blocking assay. As can be seen in FIG. 71, various anti-Gal3 antibodies including TB001, TB006, and 20H5, displayed a significant ability to block hGal3 binding to Aβ40.

[1117] FIG. 72 is a table quantifying the effect of various anti-Gal2 antibodies at blocking hGal3 binding to Aβ40. As can be seen in FIG. 72, TB001 QC190118, TB006 (QC200208), QC200195 IMTAB0219 20H5.A3-hIgG4(S228P), QC200197 IMTAB0278 798-9.20H5.A3-mH1mL0-hIgG4(S228P), QC200201 IMTAB0281 798-9.20H5.A3-mH1mL1-hIgG4(S228P), and QC210053 IMTAB0361 20H5.A3-VH3VL1-hIgG4(S228P) demonstrate significant hGA13: Aβ40 blocking ability.

### Example 35: Gal3 Antibodies Block Gal3-Induced Aggregation of Insulin Aggregation

[1118] Insulin aggregation can lead to insulin-derived amyloidosis and diabetes. To test whether anti-Gal3 antibodies could be utilized to inhibit diabetes or insulin-derived amyloidosis, it was first established that Gal3 promotes insulin aggregation.

[1119] To establish that Gal-3 promotes insulin aggregation, insulin stocks (Sigma Cat #91077C Gal-3: QCB210021), were prepared at a stock concentration of 5.165 mg/mL. Insulin (200 ug/mL) with or without gal-3 (100, 200 ug/mL) was stirred in a 20% acetic acid solution, containing 100 mM NaCl at 50 degrees. Samples were dotted at 30 min, 1 h, 2 h, 3 h, 4 h, and the blot was probed with A11 antibody (Invitrogen Cat #AHB0052, 1:1000 dilution) overnight at 4 degrees. After incubating with respective secondary antibodies for 1 h, images were developed using Azure image developer.

[1120] As can be seen in FIG. 37, Gal-3 promotes insulin aggregation.

[1121] FIG. 37 depicts 4 hour time course aggregation of insulin incubated at 50 C with 100 μg and 200 μg of Gal-3 probed with A11 antibody as detected by dot blot.

[1122] In an additional experiment to determine if galectin-3 oligomerizes with human insulin, insulin aggregates were prepared in 3 Eppendorf tubes labeled with the appropriate treatment (Insulin, Insulin+Gal 3 and Gal 3 alone). A corresponding dot blot was also prepared and labeled with a time course of 30 min, 1 hr, 2 hr and 4 hr. Insulin and Gal 3 were thawed at room temperature for 15-20 minutes. 1 mg of Insulin was weighed and reconstituted in 1 mL of buffer. (Insulin Stock Concentration was 1 mg/mL). Treatments having 200 ug/mL concentration (Insulin:200 ug/mL, Insulin and Gal 3: Both 200 ug/mL, and Gal 3 alone 200 ug/mL) were prepared in 500 μL of Buffer. The treatments were incubated at 50 degrees Celsius with continuous stirring. Samples were then dotted at 30 min, 1 h, 2 h, 3h, 4 h and the blot was probed with A11 antibody. After 4-hours, the Dot blot was rinsed once with 1×TBST and the membrane was blocked with 5% Milk in 1×TBST for 1 hour. After blocking, the membrane was washed 3 times (for 15 min each wash) with 1×TBST. The membrane was incubated with 1:1000 A11 antibody in 5% Milk for 1.5 hours at room temperature. Following incubation, the membrane was washed 3 times (for 15 min each wash) with 1×TBST and then incubated with 1:1000 Secondary Antibody Goat Anti-Rabbit IgG H&L (HRP) for 1 hour at Room Temperature. The membrane was then washed again 3 times (for 15 min each wash) with 1×TBST and developed. The dot blot was then prepared to be probed with 804 Anti Gal 3 antibody by stripping the membrane using stripping buffer for 15 minutes. The membrane was then washed 3 times (for 15 min each wash) with 1×TBST and blocked with 5% milk in TBST for 1 hr. Following blocking, the membrane was incubated with 1:1000 mouse Gal 3 804 Ab in 5% Milk in 1×TBST for overnight at 4 degrees. The membrane was then washed 3 times (for 15 min each wash) with 1×TBST and incubated the membrane with 1:1000 Secondary Antibody Goat anti mouse IgG (HRP) for 1 hr. at room temperature. Following incubation, the membrane was washed 3 times with 1×TBST and developed.

[1123] FIG. 49F is a dot blot depicting time course aggregation of insulin incubated with Gal3 and probed with A11 antibody. As can be seen in FIG. 49F, Gal3 promotes oligomerization of insulin after as little as 30 minutes of incubation. No aggregation was observed with insulin or galectin-3 alone.

[1124] FIG. 49G is a dot blot depicting time course aggregation of insulin incubated with Gal3 and probed with anti Gal-3 antibody 804. As can be seen in FIG. 49G, Gal3 promotes oligomerization of insulin after as little as 30 minutes of incubation.

[1125] To test whether anti-Gal3 antibodies could be utilized to inhibit proteopathies, it was first established using an ELISA that Gal3 is involved in the aggregation of insulin. Prior to the ELISA, insulin was aggregated by multiple days of stirring, biotinylated using EZ Link Sulfo-NHS-LC-Biotin (ThermoFisher Scientific, A39257), and desalted with a Zeba Spin Desalting Column (ThermoFisher Scientific, 89882) following the manufacturers' instructions.

[1126] To start the ELISA, coating solutions were prepared by diluting galectin-3 protein (TrueBinding, QCB210019) (TrueBinding, QCB200377) (Biolegend, 599806) in separate volumes of PBS to a concentration of 4 μg/ml. Coating solutions were applied to a 96-well ELISA plate (Thermo Scientific, 44-2401-21) by adding 80 μl per well along the top row of the plate, four wells per protein, then serially diluting two-fold downwards in PBS. After incubating the plate at 4° C. O/N, the plate was washed with 300 μl PBST three times, followed by a blocking step in which 150 μl of 2% BSA in PBST was added to every well and incubated for an hour at RT with gentle rocking. The existing blocking solution was then discarded from the plate. Insulin solution for binding was prepared by diluting biotinylated aggregated insulin in 2% BSA in PBST to a concentration of 10 μg/ml, then applied to the plate by adding 60 μl per well column-wise for three columns, one column for each galectin-3, then serially diluted two-fold length-wise rightwards in 2% BSA in PBST. The plate was incubated for an hour at RT with gentle rocking and then washed with 300 μl PBST three times. Afterward, Avidin-HRP (Biolegend, 405103) was diluted to 1:2000 in 2% BSA in PBST, then 25 μl was added to all the wells. The plate was incubated for an hour at RT with gentle rocking, then washed with 300 μl PBST three times. To develop the plate, 50 μl of ABTS (Life Technologies, 00-2024) substrate was added to each well, incubated until a sufficient signal was reached, then stopped with 25 μl of 1N HCl per well. The plate was read in a plate reader at an absorbance of 405 nm. Data was graphed using GraphPad Prism 8.0 software (GraphPad Software Inc).

[1127] FIG. 79 depicts the results of the ELISA assay examining binding of hGal3 to aggregated insulin. As can be seen in FIG. 79, moderate binding of aggregated insulin to hGal3 was observed.

[1128] 21 different Gal-3 antibody clones were then tested to determine if anti-Gal-3 antibodies block insulin aggregation. As can be seen in FIG. 49, all Gal-3 antibody clones displayed decreased insulin oligomerization as compared to insulin treated with Gal-3.

[1129] FIG. 49A-E depict embodiments of insulin oligomerization (incubated at 50 C) by Gal-3 and screening of different Gal-3 Ab clones for degrading insulin oligomerization probed with A11 Ab. FIG. 49A is a dot blot depicting a 3-hour time course of insulin oligomerization with and without Gal-3. FIG. 49B is a dot blot depicting screening of 21 different Gal-3 Ab clones for degrading insulin. FIG. 49C depicts quantification of inhibition of insulin oligomerization by 21 different Gal-3 Ab clones. FIG. 49D is a chart depicting the identity of each of the 21 different Gal-3 Ab clones screened. FIG. 49E depicts visualization of insulin aggregation with and without Gal-3 as detected using fluorescent microscopy.

### Example 36: Gal3 Promotes Calcitonin Aggregation

[1130] Calcitonin aggregation can lead to medullary carcinoma of the thyroid (MTC), Osteoporosis & Paget's Disease. To test whether anti-Gal3 antibodies could be utilized to inhibit diabetes or insulin-derived amyloidosis, it was first established that Gal3 promotes calcitonin aggregation.

[1131] FIG. 50 depicts a 48-hour time course of recombinant human calcitonin (hCT) aggregation when incubated with 100 μg of Gal-3 probed with A11 antibody as detected by dot blot.

[1132] Briefly, hCT was dissolved in 50 mM PBS buffer (pH 7.4) containing 100 mM NaCl to a final concentration of 25 μM. The solution was continuously stirred during the aggregation time course using a stir bar for 24 hrs at 37° C. The aggregation profile of hCT with out and with rhGal-3 was then determined by probing with oligomer specific antibody A11. After incubating with respective secondary antibodies for 1 h, images were developed using Azure image developer.

[1133] As can be seen in FIG. 50, Gal-3 promotes aggregation of calcitonin.

[1134] To test whether anti-Gal3 antibodies could be utilized to inhibit proteopathies, it was first established using an ELISA that Gal3 is involved in the aggregation of calcitonin. Prior to the ELISA, ANP was aggregated by multiple days (0, 1, 2 days) of stirring, biotinylated using EZ Link Sulfo-NHS-LC-Biotin (ThermoFisher Scientific, A39257), and desalted with a Zeba Spin Desalting Column (ThermoFisher Scientific, 89882) following the manufacturers' instructions.

[1135] To start the ELISA, coating solutions were prepared by diluting galectin-3 protein (TrueBinding, QCB210019) (TrueBinding, QCB200377) (Biolegend, 599806) in separate volumes of PBS to a concentration of 10 μg/ml. Coating solutions were applied to a 96-well ELISA plate (Thermo Scientific, 44-2401-21) by adding 80 μl per well along the top row of the plate, four wells per protein, then serially diluting two-fold downwards in PBS. After incubating the plate at 4° C. O/N, the plate was washed with 300 μl PBST three times, followed by a blocking step in which 150 μl of 2% BSA in PBST was added to every well and incubated for an hour at RT with gentle rocking. The existing blocking solution was then discarded from the plate. Calcitonin solution for binding was prepared by diluting biotinylated aggregated calcitonin in 2% BSA in PBST to a concentration of 10 μg/ml, then applied to the plate by adding 60 μl per well column-wise for three columns, one column for each galectin-3, then serially diluted two-fold length-wise rightwards in 2% BSA in PBST. The plate was incubated for an hour at RT with gentle rocking and then washed with 300 μl PBST three times. Afterward, Avidin-HRP (Biolegend, 405103) was diluted to 1:2000 in 2% BSA in PBST, then 25 μl was added to all the wells. The plate was incubated for an hour at RT with gentle rocking, then washed with 300 μl PBST three times. To develop the plate, 50 μl of ABTS (Life Technologies, 00-2024) substrate was added to each well, incubated until a sufficient signal was reached, then stopped with 25 μl of 1N HCl per well. The plate was read in a plate reader at an absorbance of 405 nm. Data was graphed using GraphPad Prism 8.0 software (GraphPad Software Inc).

[1136] FIG. 89 depicts the results of the ELISA assay examining binding of hGal3 to various versions of calcitonin with hGal3. As can be seen in FIG. 89, calcitonin is a moderate binder of Gal3. Aggregation of calcitonin results in a minor increase in binding affinity.

### Example 37: Gal3 Promotes Phenylalanine Aggregation

[1137] Phenylalanine (Phe) aggregation can result in Phenylketonuria. To test whether anti-Gal3 antibodies could be utilized to inhibit phenylketonuria, Gal3 was tested for its ability to promote oligomerization of Phe.

[1138] FIG. 39A-B depict 5 hour time course aggregation of phenylalanine (Phe) incubated at room temperature (RT) and 37 C with 100 μg of Gal-3 probed with A11 antibody as detected by dot blot.

[1139] Phenylalanine was diluted in 100 mM phosphate buffer saline, pH 7.4. The solution was continuously stirred during the aggregation time course using a stir bar for 24 hrs at 37° C. The aggregation profile of phenylamine with out and with rhGal-3 was determined by probing with A11. After incubating with respective secondary antibodies for 1 h, images were developed using Azure image developer.

[1140] As can be seen in FIG. 39A-B, Gal-3 promotes Phe aggregation.

### Example 38: Gal3 Promotes Glutamine Aggregation

[1141] Glutamine aggregation can result in Huntington disease. To test whether anti-Gal3 antibodies could be utilized to inhibit Huntington disease, Gal3 was tested for its ability to promote oligomerization of glutamine.

[1142] FIG. 40 depicts 5 hour time course aggregation of glutamine (GLN) incubated at room temperature (RT) with 100 μg of Gal-3 probed with A11 antibody as detected by dot blot.

[1143] Glutamine was diluted in 100 mM phosphate buffer saline, pH 7.4. The solution was continuously stirred during the aggregation time course using a stir bar for 24 hrs at 37° C. Aggregation profile of Glutamine with out and with rhGal-3 probed with A11 antibody. After incubating with respective secondary antibodies for 1 h, images were developed using Azure image developer.

[1144] As can be seen in FIG. 40, Gal-3 promotes glutamine aggregation.

### Example 39: Gal3 Promotes Myostatin Aggregation

[1145] Myostatin aggregation can result in idiopathic inflammatory myopathies (JIM). To test whether anti-Gal3 antibodies could be utilized to inhibit JIM, Gal3 was tested for its ability to promote oligomerization of glutamine.

[1146] FIG. 48A-C depict 24 hour time course aggregation of myostatin pro-peptide incubated with 100 μg of Gal-3 probed with A11 antibody. FIG. 48A depicts 24 hour time course aggregation of Myostatin pro-peptide incubated with 100 μg of Gal-3 probed with A11 antibody as detected by dot blot. FIG. 48B-C depict visualization of myostatin pro-peptide aggregation at 5, 24, and 48 hours with and without Gal-3 as detected using fluorescent microscopy.

[1147] Myostatin was diluted in 100 mM phosphate buffer saline, pH 7.4. The solution was continuously stirred during the aggregation time course using a stir bar for 24 hrs at RT. Aggregation profile of Myostatin with out and with rhGal-3 probed with A11. After incubating with respective secondary antibodies for 1 h, images were developed using Azure image developer.

[1148] As can be seen in FIG. 48, Gal-3 promotes aggregation of myostatin.

### Example 40: Gal3 Promotes Lysozyme Aggregation

[1149] Lysozyme aggregation can result in idiopathic inflammatory myopathies (IIM). To test whether anti-Gal3 antibodies could be utilized to inhibit IIM, Gal3 was tested for its ability to promote oligomerization of lysozyme.

[1150] FIG. 36 depicts 24 hour time course aggregation of lysozyme incubated with 100 μg of Gal-3 probed with A11 antibody as detected by dot blot.

[1151] Lysozyme: Sigma Cat #L1667 Gal-3: QCB210021, stock concentration 5.165 mg/mL. Lysozyme (500 ug/mL) with or without gal-3 (100 ug/mL) were stirred in a 50 mM sodium phosphate buffer (pH 6.0) containing 2 M guanidine hydrochloride buffer at R.T. Samples were dotted at 0 min, 15 min, 30 min, 1, 2, 3, 4, 5 and 24 hr. Blot was probed with A11 antibody (Invitrogen Cat #AHB0052, 1:1000 dilution) overnight at 4 degrees. After incubating with respective secondary antibodies for 1 h, images were developed using Azure image developer.

[1152] As can be seen in FIG. 36, Gal-3 promotes lysozyme aggregation.

### Example 41: Gal3 Promotes Native Haemoglobin (Hb) and Glycosylated Haemoglobin (HbAIC) Aggregation

[1153] Gal3 was tested for its ability to promote oligomerization of native haemoglobin (Hb) and glycosylated haemoglobin (HbAIC).

[1154] FIG. 38A-B depicts 5 hour time course aggregation of native haemoglobin (Hb) and glycosylated haemoglobin (HbAIC) incubated at room temperature (RT) and 37 C with 100 μg of Gal-3 probed with A11 antibody as detected by dot blot. FIG. 38A depicts 5 hour time course aggregation of native haemoglobin (Hb) incubated at room temperature (RT) and 37 C with 100 μg of Gal-3 probed with A11 antibody as detected by dot blot. FIG. 38B depicts 5 hour time course aggregation of glycosylated haemoglobin (HbAIC) incubated at room temperature (RT) and 37 C with 100 μg of Gal-3 probed with A11 antibody as detected by dot blot.

[1155] Hb and HbA1c was dissolved in 20 mM Phosphate Buffer at pH 7.4. The solution was continuously stirred during the aggregation time course using a stir bar for 24 hrs at RT & 37° C. 2 μl of each sample was pipetted onto a Whatman nitrocellulose membrane at the appropriate time points (time 0-5 hr) for dot blot. The aggregation profile of Hb and HbA1C with and without rhGal-3 was determined by probing with antibody A11. After incubating with respective secondary antibodies for 1 h, images were developed using Azure image developer.

[1156] As can be seen in FIG. 38A-B, Galectin-3 intrinsically promotes the aggregation of HbA1c both at RT and 37° C., while as Hb was not aggregated with and without Galectin3.

### Example 42: Gal3 Promotes Light Chain Aggregation

[1157] Light chain aggregation can result in light chain (AL) amyloidosis. To test whether anti-Gal3 antibodies could be utilized to inhibit AL, Gal3 was tested for its ability to promote oligomerization of light chain.

[1158] FIG. 34A-C depict time course aggregation of Light Chain, PDGFR, and MCAM, incubated with 100 μg of Gal-3 probed with A11 antibody as detected by dot blot. FIG. 34A depicts time course aggregation of Light Chain incubated with 100 μg of Gal-3 probed with A11 antibody as detected by dot blot. FIG. 34B depicts time course aggregation of PDGFR incubated with 100 μg of Gal-3 probed with A11 antibody as detected by dot blot. FIG. 34C depicts time course aggregation of MCAM incubated with 100 μg of Gal-3 probed with A11 antibody as detected by dot blot.

[1159] Light Chain (500 ug/mL) with or without gal-3 (100 ug/mL) was stirred in a 100 mM sodium phosphate buffer (pH 7.4) at R.T. Samples were dotted at spotted at d. The blot was then probed with A11 antibody (Invitrogen Cat #AHB0052, 1:1000 dilution) overnight at 4 degrees. After incubating with respective secondary antibodies for 1 h, images were developed using Azure image developer.

[1160] As can be seen in FIG. 34A-C, Gal-3 promotes aggregation of light chain.

### Example 43: Gal3 Promotes Cholesterol Aggregation

[1161] Cholesterol aggregation can result in atherosclerosis, cardiovascular disease and Alzheimer's disease. To test whether anti-Gal3 antibodies could be utilized to inhibit atherosclerosis, cardiovascular disease and Alzheimer's disease, Gal3 was tested for its ability to promote oligomerization of cholesterol.

[1162] FIG. 42A-B depicts 5 hour time course aggregation of cholesterol incubated at room temperature (RT) with 100 μg of Gal-3 probed with antibody as detected by dot blot.

[1163] Cholesterol was dissolved in Chloroform and methanol in ratio of 2:1. Chloroform was evaporated and cholesterol was diluted in PBS, pH 7.4. The solution was continuously stirred during the aggregation time course using a stir bar for 24 hrs at 37° C. 2 μl of each sample was pipetted onto a Whatman nitrocellulose membrane at the appropriate time points (time 0-5 hr) for dot blot. Aggregation profile of Cholesterol with and without rhGal-3 probed with antibody A11. After incubating with respective secondary antibodies for 1 h, images were developed using Azure image developer.

[1164] As can be seen in FIG. 42A-B, Gal-3 promotes aggregation of cholesterol.

[1165] To test whether anti-Gal3 antibodies could be utilized to inhibit proteopathies, it was first established using an ELISA that Gal3 is involved in the aggregation of cholesterol. Prior to the ELISA, human cholesterol (Thermo, C3045) was aggregated by multiple days of stirring, biotinylated using EZ Link Sulfo-NHS-LC-Biotin (ThermoFisher Scientific, A39257), and desalted with a Zeba Spin Desalting Column (ThermoFisher Scientific, 89882) following the manufacturers' instructions.

[1166] To start the ELISA, coating solutions were prepared by diluting galectin-3 protein (TrueBinding, QCB210019) (TrueBinding, QCB200377) (Biolegend, 599806) in separate volumes of PBS to a concentration of 4 μg/ml. Coating solutions were applied to a 96-well ELISA plate (Thermo Scientific, 44-2401-21) by adding 80 μl per well along the top row of the plate, four wells per protein, then serially diluting two-fold downwards in PBS. After incubating the plate at 4° C. O/N, the plate was washed with 300 μl PBST three times, followed by a blocking step in which 150 μl of 2% BSA in PBST was added to every well and incubated for an hour at RT with gentle rocking. The existing blocking solution was then discarded from the plate. Cholesterol solution for binding was prepared by diluting biotinylated aggregated cholesterol in 2% BSA in PBST to a concentration of 40 μg/ml, then applied to the plate by adding 60 μl per well column-wise for three columns, one column for each galectin-3, then serially diluted two-fold length-wise rightwards in 2% BSA in PBST. The plate was incubated for an hour at RT with gentle rocking and then washed with 300 μl PBST three times. Afterward, Avidin-HRP (Biolegend, 405103) was diluted to 1:2000 in 2% BSA in PBST, then 25 μl was added to all the wells. The plate was incubated for an hour at RT with gentle rocking, then washed with 300 μl PBST three times. To develop the plate, 50 μl of ABTS (Life Technologies, 00-2024) substrate was added to each well, incubated until a sufficient signal was reached, then stopped with 25 μl of 1N HCl per well. The plate was read in a plate reader at an absorbance of 405 nm. Data was graphed using GraphPad Prism 8.0 software (GraphPad Software Inc).

[1167] FIG. 77 depicts the results of the ELISA assay examining binding of hGal3 to aggregated cholesterol. As can be seen in FIG. 77, no binding of aggregated cholesterol was observed.

[1168] FIG. 78 depicts the results of the ELISA assay examining binding of hGal3 to 5 hour aggregated cholesterol. As can be seen in FIG. 77, moderate hGAL3 binding of aggregated cholesterol was observed.

### Example 44: Gal3 Promotes Cholesteryl Aggregation

[1169] Cholesteryl (Co-Esteryl) aggregation can result in atherosclerosis, cardiovascular disease and Alzheimer's disease. To test whether anti-Gal3 antibodies could be utilized to inhibit atherosclerosis, cardiovascular disease and Alzheimer's disease, Gal3 was tested for its ability to promote oligomerization of cholesteryl.

[1170] FIG. 41 depicts 5 hour time course aggregation of cholesteryl (Co-Esteryl) incubated at room temperature (RT) with 100 μg of Gal-3 probed with A11 antibody as detected by dot blot.

[1171] Cholesteryl was dissolved in Chloroform. Chloroform was evaporated and cholesteryl was diluted in PBS, pH 7.4. The solution was continuously stirred during the aggregation time course using a stir bar for 24 hrs at 37° C. 2 μl of each sample was pipetted onto a Whatman nitrocellulose membrane at the appropriate time points (time 0-5 hr) for dot blot. Aggregation profile of Cholesteryl with and without rhGal-3 probed with A11. After incubating with respective secondary antibodies for 1 h, images were developed using Azure image developer.

[1172] As can be seen in FIG. 41, Gal-3 promotes aggregation of cholesteryl.

### Example 45: Gal3 Promotes Atrial Natriuretic Peptide Aggregation

[1173] Atrial Natriuretic Peptide (ANP) aggregation can result in congestive heart failure (CHF) and cardiac amyloidosis. To test whether anti-Gal3 antibodies could be utilized to inhibit congestive heart failure (CHF) and cardiac amyloidosis, Gal3 was tested for its ability to promote oligomerization of ANP.

[1174] FIG. 51A-B depict Gal-3 promotion of Atrial Natriuretic Peptide (ANP) aggregation. FIG. 51A depicts embodiments of an 80-hour time course of ANP aggregation when incubated with 100 μg of Gal-3 probed with A11 antibody as detected by dot blot. FIG. 51B depicts embodiments of fluorescent microscopic visualization of ANP aggregation when incubated with 100 μg of Gal-3 probed with A11 antibody.

[1175] Three sets of proteins with concentrations 100 ug/ml each, ANP or Gal3 alone or in combinations (ANP+Gal3) were incubated in distilled water pH 5.75 with continued stirring for the 0-48 hrs time points at RT. The oligomerization were assayed using dot blot analysis. 2 ul of protein aliquots from each time points for all three sets were added to nitrocellulose membranes. The identical membranes were blocked with 5% non-fat dry milk for 1 h, followed by overnight incubation with ANP, Gal3 and A11 antibodies. After incubating with respective secondary antibodies for 1 h, images were developed using Azure image developer.

[1176] As can be seen in FIG. 51, Gal-3 promotes aggregation of ANP.

[1177] Gal3 binding to aggregated or unaggregated ANP was also tested using an Elisa. Prior to the ELISA, ANP was aggregated by multiple days of stirring, biotinylated using EZ Link Sulfo-NHS-LC-Biotin (ThermoFisher Scientific, A39257), and desalted with a Zeba Spin Desalting Column (ThermoFisher Scientific, 89882) following the manufacturers' instructions.

[1178] To start the ELISA, coating solutions were prepared by diluting galectin-3 protein (TrueBinding, QCB210019) (TrueBinding, QCB200377) (Biolegend, 599806) in separate volumes of PBS to a concentration of 4 μg/ml. Coating solutions were applied to a 96-well ELISA plate (Thermo Scientific, 44-2401-21) by adding 80 μl per well along the top row of the plate, four wells per protein, then serially diluting two-fold downwards in PBS. After incubating the plate at 4° C. O/N, the plate was washed with 300 μl PBST three times, followed by a blocking step in which 150 μl of 2% BSA in PBST was added to every well and incubated for an hour at RT with gentle rocking. The existing blocking solution was then discarded from the plate. ANP solution for binding was prepared by diluting biotinylated aggregated ANP in 2% BSA in PBST to a concentration of 10 μg/ml, then applied to the plate by adding 60 μl per well column-wise for three columns, one column for each galectin-3, then serially diluted two-fold length-wise rightwards in 2% BSA in PBST. The plate was incubated for an hour at RT with gentle rocking and then washed with 300 μl PBST three times. Afterward, Avidin-HRP (Biolegend, 405103) was diluted to 1:2000 in 2% BSA in PBST, then 25 μl was added to all the wells. The plate was incubated for an hour at RT with gentle rocking, then washed with 300 μl PBST three times. To develop the plate, 50 μl of ABTS (Life Technologies, 00-2024) substrate was added to each well, incubated until a sufficient signal was reached, then stopped with 25 μl of 1N HCl per well. The plate was read in a plate reader at an absorbance of 405 nm. Data was graphed using GraphPad Prism 8.0 software (GraphPad Software Inc).

[1179] FIG. 88 depicts the results of the ELISA assay examining binding of hGal3 to aggregated and unaggregated ANP. As can be seen in FIG. 88, ANP is likely a weak binder or non-binder of Gal3 when un-aggregated. Aggregation of ANP causes a significant increase in ANP:Gal3 binding.

### Example 46: Gal3 Promotes Pro-B Type Natriuretic Peptide Aggregation

[1180] Pro-B type Natriuretic Peptide (BNP) aggregation can result in congestive heart failure (CHF) and cardiac amyloidosis. To test whether anti-Gal3 antibodies could be utilized to inhibit congestive heart failure (CHF) and cardiac amyloidosis, Gal3 was tested for its ability to promote oligomerization of BNP.

[1181] FIG. 52A-B depict Gal-3 promotion of Pro-B type Natriuretic Peptide (BNP) aggregation. FIG. 52A depicts embodiments of a 48-hour time course of BNP aggregation when incubated with 100 μg of Gal-3 probed with A11 antibody as detected by dot blot. FIG. 52B depicts embodiments of fluorescent microscopic visualization of BNP aggregation when incubated with 100 μg of Gal-3 probed with A11 antibody and incubated for 24-hours at room temperature.

[1182] Three sets of proteins with concentrations 100 ug/ml each, NT-Pro BNP or Gal3 alone or in combinations (NT-Pro BNP+Gal3) were incubated in distilled water pH 5.75 with continued stirring for the 0-48 hrs time points at RT. The Oligomerization were assayed using dot blot analysis. 2 ul of protein aliquots from each time points for all three sets were added to nitrocellulose membranes. The identical membranes were blocked with 5% non-fat dry milk for 1 h, followed by overnight incubation with BNP, Gal3 and A11 antibodies. After incubating with respective secondary antibodies for 1 h, images were developed using Azure image developer.

[1183] As can be seen in FIG. 52, Gal-3 promotes aggregation of BNP.

### Example 47: Gal3 Promotes Cystatin-C Aggregation

[1184] Cystatin-C aggregation can result in kidney disease, CAA, or Alzheimer's disease. To test whether anti-Gal3 antibodies could be utilized to inhibit kidney disease, CAA, or Alzheimer's disease, Gal3 was tested for its ability to promote oligomerization of cystatin-c.

[1185] FIG. 47A-F depicts time course aggregation of Cystatin-C incubated with 100 μg of Gal-3 probed with A11 antibody as detected by dot blot. FIG. 47A depicts 24 hour time course aggregation of Cystatin-C incubated with 100 μg of Gal-3 probed with A11 antibody as detected by dot blot. FIG. 47B depicts 24 hour time course aggregation of Cystatin-C incubated with 100 μg of Gal-3 probed with Cystatin-C antibody as detected by dot blot. FIG. 47C depicts 24 hour time course aggregation of Cystatin-C incubated with 100 μg of Gal-3 probed with 804 antibody as detected by dot blot. FIG. 47D depicts 5 hour time course aggregation of Cystatin-C incubated with Gal-3 probed with A11 antibody as detected by dot blot. FIG. 47E depicts 5 hour time course aggregation of Cystatin-C incubated with Gal-3 probed with cystatin-C antibody as detected by dot blot. FIG. 47F depicts 5 hour time course aggregation of Cystatin-C incubated with Gal-3 probed with 804 antibody as detected by dot blot.

[1186] Three sets of proteins, 100 μg/ml each of Human Cystatin C, Gal3 alone or in combinations (Cystatin C+Gal3), were incubated in phosphate buffer pH 7.4 with continued stirring for the 0-24 hrs time points at 370 C. Oligomerization were assayed using dot blot analysis. 2 ul of protein aliquots from each time points for all three sets were added to nitrocellulose membranes. The identical membranes were blocked with 5% non-fat dry milk for 1 h, followed by overnight incubation with Cystatin C, Gal3 and A11 antibodies. After incubating with respective secondary antibodies for 1 h, images were developed using Azure image developer.

[1187] For Gal3 antibodies, two-fold concentration of 2D10, TB006, and TB001 were added to respective reaction tubes containing Gal3 and Cystatin C protein (100 ug/ml), and incubation with continued stirring was done as before.

[1188] As can be seen in FIG. 47A-F, Gal-3 promotes aggregation of cystatin-c.

### Example 48: Gal3 Promotes Fibrin Aggregation

[1189] Fibrin aggregation can result in cerebrovascular damage, stroke, CAA, or Alzheimer's disease. To test whether anti-Gal3 antibodies could be utilized cerebrovascular damage, stroke, CAA, or Alzheimer's disease, Gal3 was tested for its ability to promote oligomerization of fibrin.

[1190] FIG. 32A-F depict time course aggregation of Fibrin incubated with 100 μg of Gal-3 probed with A11 as detected by dot blot. FIG. 32A depicts time course aggregation of Fibrin incubated with 100 μg of Gal-3 probed with A11 as detected by dot blot. FIG. 32B depicts quantification of Gal-3 intrinsic promotion of Fibrin oligomerization. FIG. 32C depicts degradation of toxic Fibrin oligomers by hTB001 and hTB006 as detected by dot blot. FIG. 32D depicts screening of different Gal-3 antibody clones on Fibrin oligomerization probed with A11 antibody. FIG. 32E depicts quantification of different Gal-3 antibody clones on Fibrin oligomerization probed with A11 antibody. FIG. 32F is a table depicting the identity and isotype of Gal-3 antibody clones screened.

[1191] 1 mg of fibrin peptide was resuspended in 90 μl of 100 mM NaOH and incubated for 10 minutes. This solution was then diluted to final concentration 0.1 mg/ml by adding 10 mM sodium phosphate buffer, pH 7.4. Gal-3 and/or antibodies were added to test their effects. The solution was continuously stirred using a stir bar while incubating at room temperature. At various time points after mixing, samples were taken and probed on a dot blot to detect formation of oligomers using A11 antibody. After incubating with respective secondary antibodies for 1 h, images were developed using Azure image developer.

[1192] As can be seen in FIG. 32, Gal-3 promotes aggregation of fibrin.

[1193] Gal3 binding to fibrin was also tested using an Elisa. Prior to the ELISA, human fibrin was aggregated by multiple days of stirring, biotinylated using EZ Link Sulfo-NHS-LC-Biotin (ThermoFisher Scientific, A39257), and desalted with a Zeba Spin Desalting Column (ThermoFisher Scientific, 89882) following the manufacturers' instructions.

[1194] To start the ELISA, coating solutions were prepared by diluting galectin-3 protein (TrueBinding, QCB210019) (TrueBinding, QCB200377) (Biolegend, 599806) in separate volumes of PBS to a concentration of 4 μg/ml. Coating solutions were applied to a 96-well ELISA plate (Thermo Scientific, 44-2401-21) by adding 80 μl per well along the top row of the plate, four wells per protein, then serially diluting two-fold downwards in PBS. After incubating the plate at 4° C. O/N, the plate was washed with 300 μl PBST three times, followed by a blocking step in which 150 μl of 2% BSA in PBST was added to every well and incubated for an hour at RT with gentle rocking. The existing blocking solution was then discarded from the plate. Fibrin solution for binding was prepared by diluting biotinylated aggregated fibrin in 2% BSA in PBST to a concentration of 4 μg/ml, then applied to the plate by adding 60 μl per well column-wise for three columns, one column for each galectin-3, then serially diluted two-fold length-wise rightwards in 2% BSA in PBST. The plate was incubated for an hour at RT with gentle rocking and then washed with 300 μl PBST three times. Afterward, Avidin-HRP (Biolegend, 405103) was diluted to 1:2000 in 2% BSA in PBST, then 25 μl was added to all the wells. The plate was incubated for an hour at RT with gentle rocking, then washed with 300 μl PBST three times. To develop the plate, 50 μl of ABTS (Life Technologies, 00-2024) substrate was added to each well, incubated until a sufficient signal was reached, then stopped with 25 μl of 1N HCl per well. The plate was read in a plate reader at an absorbance of 405 nm. Data was graphed using GraphPad Prism 8.0 software (GraphPad Software Inc).

[1195] FIG. 83 depicts the results of the ELISA assay examining binding of hGal3 to aggregated NFL. As can be seen in FIG. 83, weak binding of hGal3 to aggregated NFL was observed.

### Example 49: Gal3 Promotes Aggregation of Complement Protein C3

[1196] Oligomerization of complement protein C3 can lead to disruption of the innate immune system. To test whether anti-Gal3 antibodies could be utilized to inhibit innate immune system disruption, it was first established that Gal3 promotes C3 aggregation.

[1197] FIG. 35A-B depict 24 hour time course aggregation of complement proteins (C3 & C9) incubated with 100 μg of Gal-3 probed with A11 antibody as detected by dot blot. FIG. 35A depicts 24 hour time course aggregation of complement proteins C3 incubated with 100 μg of Gal-3 probed with A11 antibody as detected by dot blot. FIG. 35B depicts 24 hour time course aggregation of complement protein C9 incubated with 100 μg of Gal-3 probed with A11 antibody as detected by dot blot.

[1198] To determine whether oligomerized C3 binds hGal3, Gal3 binding to oligomerized C3 was tested using a dot blot. 1 mg of lyophilized C3 peptide was resuspended in 90 μl of 100 mM NaOH and incubated for 10 minutes. The solution was then diluted to final concentration 0.1 mg/ml by adding 100 mM sodium phosphate buffer, pH 7.4. Synthetic C3 and peptide were then mixed with rhGal-3 protein, and incubated for 1 hr at RT. After 1 hour, different concentrations of hTB001 and hTB006Ab were added and the solution was incubated for 5 hours at RT. 2 μl of each sample was pipetted onto a Whatman nitrocellulose membrane at the appropriate time points (time 0-5 hr) for a dot blot and probed with antibody A11.

[1199] As can be seen in FIG. 35A-B, rhGal-3 induces oligomerization of C3.

[1200] To determine whether oligomerized C3 binds hGal3, Gal3 binding to oligomerized C3 was also tested using an Elisa. Prior to the ELISA, human C3 was aggregated by multiple days of stirring, biotinylated using EZ Link Sulfo-NHS-LC-Biotin (ThermoFisher Scientific, A39257), and desalted with a Zeba Spin Desalting Column (ThermoFisher Scientific, 89882) following the manufacturers' instructions.

[1201] To start the ELISA, coating solutions were prepared by diluting galectin-3 protein (TrueBinding, QCB210019) (TrueBinding, QCB200377) (Biolegend, 599806) in separate volumes of PBS to a concentration of 4 μg/ml. Coating solutions were applied to a 96-well ELISA plate (Thermo Scientific, 44-2401-21) by adding 80 μl per well along the top row of the plate, four wells per protein, then serially diluting two-fold downwards in PBS. After incubating the plate at 4° C. O/N, the plate was washed with 300 μl PBST three times, followed by a blocking step in which 150 μl of 2% BSA in PBST was added to every well and incubated for an hour at RT with gentle rocking. The existing blocking solution was then discarded from the plate. C3 solution for binding was prepared by diluting biotinylated aggregated C3 in 2% BSA in PBST to a concentration of 4 μg/ml, then applied to the plate by adding 60 μl per well column-wise for three columns, one column for each galectin-3, then serially diluted two-fold length-wise rightwards in 2% BSA in PBST. The plate was incubated for an hour at RT with gentle rocking and then washed with 300 μl PBST three times. Afterward, Avidin-HRP (Biolegend, 405103) was diluted to 1:2000 in 2% BSA in PBST, then 25 μl was added to all the wells. The plate was incubated for an hour at RT with gentle rocking, then washed with 300 μl PBST three times. To develop the plate, 50 μl of ABTS (Life Technologies, 00-2024) substrate was added to each well, incubated until a sufficient signal was reached, then stopped with 25 μl of 1N HCl per well. The plate was read in a plate reader at an absorbance of 405 nm. Data was graphed using GraphPad Prism 8.0 software (GraphPad Software Inc).

[1202] FIG. 84 depicts the results of the ELISA assay examining binding of hGal3 to aggregated C3. As can be seen in FIG. 84, hGal3 demonstrates moderate binding to C3 even at diminishing concentrations of Aβ40 or hGal3.

[1203] An ELISA was also used to determine the IC50s of various antibodies against galectin-3:: aggregated Complement C3. Prior to the ELISA, complement C3 (MyBioSource) was aggregated by 48 hours of stirring, biotinylated using EZ Link Sulfo-NHS-LC-Biotin (ThermoFisher Scientific, A39257), and desalted with a Zeba Spin Desalting Column (ThermoFisher Scientific, 89882) following the manufacturers' instructions.

[1204] Human Galectin-3 (Gal3) protein (TrueBinding, QCB210019) was diluted in PBS to a concentration of 4 μg/ml and coated a 96-well ELISA plate by applying 35 μl to each well. After incubating the plate at 4° C. O/N, the plate was washed three times with 300 μl PBST. The plate was then blocked for an hour with 150 μl of 2% BSA in PBST at RT with gentle rocking. Thereafter, the 2% BSA in PBST was discarded and 30 μl of TB001 (TrueBinding, QC190118), TB006 (TrueBinding, QC200208), MOPC21 (TrueBinding, QC200153) (3-fold serial dilutions beginning at 30 μg/ml) in 2% BSA in PBST was added to the wells, immediately followed by the addition of 30 μl of biotinylated aggregated Complement C3 diluted to 4 μg/ml in 2% BSA in PBST. The plate was incubated for an hour at RT with gentle rocking and then washed three times with 300 μl PBST. Thereafter, Avidin HRP (Biolegend, 405103) was diluted in 2% BSA in PBST (1:2000 dilution) and 25 μl added to the wells. The plate was incubated at RT for an hour with gentle rocking and washed three times with 300 μl PBST. 50 μl of ABTS (Life Technologies, 00-2024) was added to each well to develop, then the plate was read using a plate reader at an absorbance of 405 nm. IC50 values were generated using GraphPad Prism 8.0 software (GraphPad Software Inc.), following the manufacturer's instructions.

[1205] FIG. 85 depicts the results of the ELISA assay determining the IC50s of anti-hGal3 antibodies against hGal3:C3. As can be seen in FIG. 85, anti-hGal3 antibodies display a range of IC50s.

### Example 50: Gal3 Promotes Aggregation of Complement Protein C9

[1206] Oligomerization of complement protein C9 can lead to disruption of the innate immune system. To test whether anti-Gal3 antibodies could be utilized to inhibit innate immune system disruption, it was first established that Gal3 promotes C3 aggregation.

[1207] To determine whether oligomerized C9 binds hGal3, Gal3 binding to oligomerized C3 was tested using a dot blot. 1 mg of lyophilized C9 peptide was resuspended in 90 μl of 100 mM NaOH and incubated for 10 minutes. The solution was then diluted to final concentration 0.1 mg/ml by adding 100 mM sodium phosphate buffer, pH 7.4. Synthetic C9 and peptide were then mixed with rhGal-3 protein, and incubated for 1 hr at RT. After 1 hour, different concentrations of hTB001 and hTB006Ab were added and the solution was incubated for 5 hours at RT. 2 μl of each sample was pipetted onto a Whatman nitrocellulose membrane at the appropriate time points (time 0-5 hr) for a dot blot and probed with antibody A11.

[1208] As can be seen in FIG. 35B, rhGal-3 induces oligomerization of C9.

[1209] To determine whether oligomerized C9 binds hGal3, Gal3 binding to oligomerized C9 was also tested using an Elisa. Prior to the ELISA, human C9 was aggregated by multiple days of stirring, biotinylated using EZ Link Sulfo-NHS-LC-Biotin (ThermoFisher Scientific, A39257), and desalted with a Zeba Spin Desalting Column (ThermoFisher Scientific, 89882) following the manufacturers' instructions.

[1210] To start the ELISA, coating solutions were prepared by diluting galectin-3 protein (TrueBinding, QCB210019) (TrueBinding, QCB200377) (Biolegend, 599806) in separate volumes of PBS to a concentration of 4 μg/ml. Coating solutions were applied to a 96-well ELISA plate (Thermo Scientific, 44-2401-21) by adding 80 μl per well along the top row of the plate, four wells per protein, then serially diluting two-fold downwards in PBS. After incubating the plate at 4° C. O/N, the plate was washed with 300 μl PBST three times, followed by a blocking step in which 150 μl of 2% BSA in PBST was added to every well and incubated for an hour at RT with gentle rocking. The existing blocking solution was then discarded from the plate. C9 solution for binding was prepared by diluting biotinylated aggregated C9 in 2% BSA in PBST to a concentration of 4 μg/ml, then applied to the plate by adding 60 μl per well column-wise for three columns, one column for each galectin-3, then serially diluted two-fold length-wise rightwards in 2% BSA in PBST. The plate was incubated for an hour at RT with gentle rocking and then washed with 300 μl PBST three times. Afterward, Avidin-HRP (Biolegend, 405103) was diluted to 1:2000 in 2% BSA in PBST, then 25 μl was added to all the wells. The plate was incubated for an hour at RT with gentle rocking, then washed with 300 μl PBST three times. To develop the plate, 50 μl of ABTS (Life Technologies, 00-2024) substrate was added to each well, incubated until a sufficient signal was reached, then stopped with 25 μl of 1N HCl per well. The plate was read in a plate reader at an absorbance of 405 nm. Data was graphed using GraphPad Prism 8.0 software (GraphPad Software Inc).

[1211] FIG. 86 depicts the results of the ELISA assay examining binding of hGal3 to aggregated C9.As can be seen in FIG. 86, hGal3 demonstrates weak binding to C9.

[1212] FIG. 87 depicts the results of the ELISA assay determining the IC50s of anti-hGal3 antibodies against hGal3:C9.

[1213] As can be seen in FIG. 87, anti-hGal3 antibodies display a range of IC50s.

### Example 51: Gal3 Promotes Aggregation of hTGFβR2

[1214] An ELISA was used to evaluate blocking efficacies of various anti-hGal3 antibodies against hGal3::hTGFβR2. Prior to the ELISA, hTGFβR2 was aggregated by 48 hours of stirring, biotinylated using EZ Link Sulfo-NHS-LC-Biotin (ThermoFisher Scientific, A39257), and desalted with a Zeba Spin Desalting Column (ThermoFisher Scientific, 89882) following the manufacturers' instructions.

[1215] Prior to the ELISA, hTGFβR2 was aggregated by multiple days of stirring, biotinylated using EZ Link Sulfo-NHS-LC-Biotin (ThermoFisher Scientific, A39257), and desalted with a Zeba Spin Desalting Column (ThermoFisher Scientific, 89882) following the manufacturers' instructions.

[1216] Human Galectin-3 (Gal3) protein (TrueBinding, QCB200377) was diluted in PBS to a concentration of 4 μg/ml and coated a 96-well ELISA plate by applying 35 μl to each well. After incubating the plate at 4° C. O/N, the plate was washed three times with 300 μl PBST. The plate was then blocked for an hour with 150 μl of 2% BSA in PBST at RT with gentle rocking. Thereafter, the 2% BSA in PBST was discarded and 30 μl of TB001 (TrueBinding, QC190118), TB006 (TrueBinding, QC200208), several 20H5 (TrueBinding, various QC #), or Synagis hIgG4 Isotype (TrueBinding, QC190234) (3-fold serial dilutions beginning at 10 μg/ml) in 2% BSA in PBST was added to the wells, immediately followed by the addition of 30 μl of 1 μg/ml of biotinylated hTGFβR2 in 2% BSA in PBST. The plate was incubated for an hour at RT with gentle rocking and then washed three times with 300 μl PBST. Thereafter, Avidin HRP (Biolegend, 405103) was diluted in 2% BSA in PBST (1:2000 dilution) and 25 μl was added to the wells. The plate was incubated at RT for an hour with gentle rocking and washed three times with 300 μl PBST. 50 μl of ABTS (Life Technologies, 00-2024) was added to each well to develop, then the plate was read using a plate reader at an absorbance of 405 nm. Data was graphed using GraphPad Prism 8.0 software (GraphPad Software Inc).

[1217] FIG. 92 depicts the results of the blocking efficacy determination as measured by Elisa.

[1218] FIG. 93 is a table depicting the blocking efficacy of QC200137 IMTAB0172 14H10.2C9-hIgG4(S228P), IMTAB0111 F798-9C.13H12.2F8-hIgG4(S228P), QC200172 IMTAB0196 846.1H12-hIgG4(S228P), TB006 (QC200208), hIgG4 synagis (QC200234)(negative control).

[1219] As can be seen in FIG. 92-93, QC200137 IMTAB0172 14H10.2C9-hIgG4(S228P), IMTAB0111 F798-9C.13H12.2F8-hIgG4(S228P), QC200172 IMTAB0196 846.1H12-hIgG4(S228P), TB006 (QC200208) each able to block hGal3::hTGFbR2 with greater than 90% efficacy.

### Example 52: Comparative Effect of Small Molecular Gal-3 Inhibitor TD139 and TB006 on Degradation of Aβ42 Oligomers

[1220] TD139 and TB006 were tested for their relative ability to promote degradation of Aβ oligomers.

[1221] FIG. 44A-B depict comparative degradation of Aβ42 oligomers by TB139 and TB006 incubated at RT and probed with oligomer A11 6E10 degrading antibody as detected by dot blot. FIG. 44A depicts comparative degradation of Aβ42 oligomers by TB139 and TB006 incubated at RT and probed with oligomer A11 degrading antibody as detected by dot blot. FIG. 44B depicts comparative degradation of Aβ42 oligomers by TB139 and TB006 incubated at RT and probed with 6E10 degrading antibody as detected by dot blot.

[1222] 1 mg of the lyophilized Aβ42 peptide (r-peptide) was resuspended in 90 μl of 100 mM NaOH and incubated for 10 minutes. Solution was then diluted to final concentration 0.1 mg/ml by adding 100 mM sodium phosphate buffer, pH 7.4. Synthetic Aβ42 peptide was mixed with 100 ug of rhGal-3 protein, and incubated for 1 hr at RT. rhGal-3 induces oligomerization. After 1 hr different concentration of TD139 (small molecule from Galecto Inc.) and hTB006Ab (Galectin-3 Antibody from Truebinding Inc.) was added. Solution was incubated for 24 hrs at RT. 2 μl of each sample was pipetted onto a Whatman nitrocellulose membrane for dot blot probed with antibody A11. In order to confirm the Aβ42, membrane was also probed with antibody 6E10. After incubating with respective secondary antibodies for 1 h, images were developed using Azure image developer.

[1223] In conclusion TB006 degraded the toxic Aβ42 oligomers while TD139 was not able to degrade these toxic oligomers.

### Example 53: Anti-Gal3 Blocking Antibodies

[1224] Anti-Gal3 blocking antibodies were tested to determine the epitopes of hGal3 after binding with TB006 blocking antibodies. Hydrogen/deuterium exchange (HDX) (Trajan, compact) mass spectrometry (MS) (ThermoFisher, Q-Exactive) (HDX-MS) was used to determine the binding site between antibody and antigen. The protein interaction decreases the deuterium uptake at its binding position, and thus causes a mass shift between bound and unbound samples. The mass shift can be detected using mass spec. In a routine HDX-MS analysis, bound and unbound samples are analyzed following a set of optimized parameters. The deuterium uptake difference (bound-unbound) at residue level is demonstrated using a heatmap. In a protein sequence, the residues with negative mass shift indicate that this might be the binding site, and gradient colors, or a greyscale gradient, are commonly used to show the intensity of the binding interaction on different residues in a protein sequence. HDX-MS data is processed using PMI Byos or HDExaminer.

[1225] FIG. 66A-k depict heat maps showing the affinity of anti-Gal3 blocking antibodies to various Gal3 residues. FIG. 66A is a table listing some illustrative embodiments of anti-Gal3 blocking antibodies. FIG. 66B-66K depict heat maps showing the affinity of some embodiments of anti-Gal3 blocking antibodies to Gal3 epitopes.

[1226] Clean reaction vials were prepared by putting a clean glass insert in a glass vial, and then sealing the glass vial with a new aluminum cap using a clamp. Glass vials can be reused without cleaning. Glass insert can be reused after a thoroughly cleaning. A protease column was then installed in the column chamber of the HDX system. When not in use, a protease column should be stored under 4° C. The nitrogen supply was then checked. A HDX run may consume up to 100 psi nitrogen. The HDX sample outlet tube was connected to a MS ion source and the MS was then configured. A blank buffer was prepared. 1×PBS. 0.5 mL 10×PBS into 4.5 mL milli-Q water Was diluted in a clean HDX buffer vial. The vial was then labeled and stored in HDX plate 1, position H1R1. Expiration was 3 months from the date of preparation. An exchange buffer was prepared. 0.5 mL 10×PBS was diluted into 4.5 mL 99.8% deuterium oxide in a clean HDX buffer vial. The vial was labeled and stored in HDX plate 1, position H1R2. To prepare the quench buffer, 1 mL 8M Guanidine HCl and 0.04 mL 99% formic acid were diluted into 3.96 mL milli-Q water in a clean HDX buffer vial. Expiration was 3 months from the date of preparation. A 1.6M Guanidine HCl with 0.8% Formic acid quench buffer was prepared and stored in HDX plate 2, position H2R1. Expiration was 3 months from the date of preparation. Quench buffer for proteins that don't have disulfide bonds, such as human galectin-3. A protease column wash buffer was prepared. To prepare the protease column wash buffer, 0.563 mL 8M Guanidine HCl and 0.04 mL 99% formic acid were diluted into 4.397 mL milli-Q water in a clean HDX buffer vial. The vials were stored in HDX plate 1, position H1R3. Expiration was 3 months from the date of preparation. LC phase A, 0.1% formic acid in milli-Q water, was prepare by mixing 1 mL 99% formic acid and 999 mL milli-Q water in a 1 L LC bottle. Expiration was 3 months from the date of preparation. LC phase B, 0.1% formic acid in CAN, was prepared by mixing 1 mL 99% formic acid and 999 mL ACN in a 1 L LC bottle. Expiration was 3 months from the date of preparation. LC phase C, 0.1% formic acid in milli-Q water, was prepared by mixing 1 mL 99% formic acid and 999 mL milli-Q water in a 1 L LC bottle. Expiration was 3 months from the date of preparation. LC seal wash buffer, 10% methanol, was prepared by mixing 100 mL methanol and 900 mL milli-Q water in a 1 L LC bottle. Expiration was 3 months from the date of preparation. HDX syringe wash 1, 0.1% formic acid in milli-Q water, was prepared by mixing 1 mL 99% formic acid and 999 mL milli-Q water in a 1 L LC bottle. Expiration was 3 months from the date of preparation. HDX syringe wash 2, 0.1% formic acid in CAN, was prepared by mixing 1 mL 99% formic acid and 999 mL ACN in a 1 L LC bottle. Expiration was 3 months from the date of preparation.

[1227] Fresh samples were then prepared for the HDX-MS analysis, the unbound and bound samples were stored in HDX plate 2 sample position 1 and 2, respectively. The bound sample was incubated at room temperature for 1 hour prior to placing it in the HDX plate. In the bound sample, target molecule and its binding pair have a molar ratio 1:5. Expiration was 1 week from the date of preparation.

[1228] To determine the binding site of hGal-3, 0.5 mg/mL unbound hGal-3 in 1×PBS buffer and a bound sample comprising 0.5 mg/mL hGal-3 and 7.5 mg/mL antibody in 1×PBS buffer were prepared.

[1229] LC parameters consisted of the following: Column: Hypersil Gold column, 50×1 mm, 1.9 um column, Thermo Part #25002-051030; Loading pump pressure upper limit: 250 bar; NC pump pressure upper limit: 620 bar.

[1230] MS parameters are listed in Table 2.

TABLE 2

| Parameter | Analysis of hGal-3 | Analysis of antibody or fab |
|---|---|---|
| Method name | HDX_30 min_F4_TandemMS_40 min | HDX_40 minLC_21 minMS_Tandem_TB006Fab.meth |
| Experiment | Full MS −> ddMS² | |
| Method duration | 25 min | 30 min |
| Run time | 1 to 16.5 min | 1 to 21 min |
| Polarity | Positive | |
| Default charge state | 2 | |
| Full MS Resolution | 35,000 | |
| Full MS AGC target | 3e6 | |
| Full MS Maximum IT | 200 ms | |
| Full MS Scan range | 350 to 1750 m/z | |
| dd-MS² Resolution | 17,500 | |
| dd-MS² AGC target | 1e5 | |
| dd-MS² Maximum IT | 50 ms | |
| dd-MS² Loop count | 10 | |
| dd-MS² Top N | 10 | |
| dd-MS² Isolation | 2.0 m/z | |
| window | | |
| dd-MS² (N)CE / Stepped | nce: 27 | |
| (N)CE | | |
| dd settings Minimum | 8.00e3 | |
| AGC target | | |
| dd settings Intensity | 1.6e5 | |
| threshold | | |
| dd settings Charge | Unassigned, >8 | |
| exclusion | | |
| dd settings Peptide match | preferred | |
| dd settings Exclude | on | |
| isotopes | | |
| dd settings Dynamic | 20.0 s | |
| exclusion | | |
| Tune Switch count | 2 | |
| Base tune | HDX tune_CZ_V4_GasSave.mstune | |
| Tune Element 1 at | 1.00 | |
| Element 1 tunefile | HDX tune_CZ_V4.mstune | |
| Tune Element 2 at | 16.50 | 20.98 |

| | |
|---|---|
| Element 2 tunefile | HDX tune_CZ_V4_GasSave.mstune |

[1231] HDX parameters are listed in Table 3.

TABLE 3

| Parameter | Analysis of hGal-3 | Analysis of antibody or fab |
|---|---|---|
| Analysis method for blank | Gal-3_H2O.cam | |
| Analysis method for test | Gal-3_D2O.cam | |
| sample | | |
| Exchange time | *4~6 time points from 0 s to a few hours. | |
| | For example: 0, 60, 600, 3600. | |
| Total LC Runtime (min) | 40 | |
| LC backflush Start Time | 30.6 | |
| Protein Asp Vol [μL] | 2.2 | |
| Protein Disp Vol [μL] | 2 | |
| Deuterium Volume [μL] | 18 | |
| Transfer Vol [μL] | 18 | |
| Quench Volume [μL] | 30 | |
| Injection Vol [μL] | 45 | |
| Protein Sample Tray | HDxHolder2: Sample | |
| Protein Sample Position | *Depends on the actual sample position, normally | |
| | unbound sample at position 1 and bound sample at | |
| | position 2. | |
| Quench Reaction Time | 0.5 | |
| Label Plate | HDxHolder 1: Vials | |
| Initial Exchange Vial | *Depends on the position of reaction vials, Such as 1. | |
| Digest Time [s] | 180 | |
| Digest Flow Rate [ml/min] | 0.2 | |
| Pepsin Washes | 2 | |
| Data System Output Dir | *Designate a folder to save data | |
| Data System Method | HDX_30 min_F4_TandemMS_40 min | HDX_40 minLC_21 minMS_Tandem_TB006Fab.meth |

| | |
|---|---|
| Filename | *Distinguish files as blank, unbound, and bound. No |
| | need to specify the exchange time for each file. |

[1232] The samples were run and the data were processed. In the data processing, deuterium uptake of hGal3 was normalized to have the upper limit in the N-terminal (aa1-aa112) as 10. The amino acids that have deuterium uptake >5 (half of the strongest binding) were considered to be epitopes.

[1233] FIG. 66 depict heat maps showing the affinity of anti-Gal3 blocking antibodies to various Gal3 residues. FIG. 66A is a table depicting some embodiments of anti-Gal3 blocking antibodies. FIG. 66B-66K depict heat maps showing the affinity of some anti-Gal3 blocking antibodies to Gal3 epitopes. HDX results were shown as a heatmap in column G to column IV. Above the heatmap, row 2 and 3 show the amino acid position and sequence of hGal3. Clone #0 (Row 4) shows the HDX results of the control, TB006. #1-12 (row 5-16) shows the data of 12 antibodies that can block TB006>90%.

[1234] In the heatmap, black areas indicate binding interactions of hGal3 with the antibodies. The darker the greyscale, the stronger the relative binding interaction. The epitope summary is shown in column E. Binding interactions (dark areas in the heatmap) on hGal3 C-terminal (aa113-aa250) are not considered to be epitopes, because they bind to the glycan instead of the CDRs of an antibody.

[1235] Table. 1 list different Gal3 peptides (SEQ ID No.: 1619-1660) used for mapping analysis of TB006, TB101 and 2D10 Ab binding.

[1236] FIG. 60 depicts the mutational analysis of TB006Ab binding with Gal 3 peptides (SEQ ID No. 1619-1630) by Microarray.

[1237] FIG. 61 depicts the mutational analysis of TB101 Ab binding with Gal 3 peptides (SEQ ID No. 1619-1630) by Microarray.

[1238] FIG. 62 depicts the mutational analysis of 2D10 Ab binding with Gal 3 peptides (SEQ ID No. 1619-1623, 1631-1634, 1641-1644, and 1651-1654) by Microarray.

[1239] FIG. 63 depicts the mutational analysis of TB006, TB101, 2D10 Ab binding with Gal 3 peptides (SEQ ID No. 1619-1660) by Microarray.

[1240] FIG. 64 is an illustrative embodiment showing a comparison of some embodiments of epitope mapping analysis.

[1241] FIG. 65 is an illustrative embodiment showing a comparison of some embodiments of epitope mapping analysis. Chain A represents the amino acid numbers on the 18 aa peptide whereas Chain B represents the amino acid numbers on the Heavy chain of TB006 FAb and Chain L represents the light chain.

[1242] As is clear from FIG. 60-66, various anti-Gal3 blocking antibodies block binding of an anti-Gal3 antibody by at least 80% as compared to anti-Gal3 binding in the absence of an anti-Gal3 blocking antibody.

### Example 54: Competition Binding Assay

[1243] Anti-Gal3 blocking antibodies were evaluated for their ability to block binding of Gal3 with hTB001, hTB006, Aβ42, Aβ40, Aβ42 alpha synuclein, and hTau. To identify Gal3-targeted antibodies with the ability to block the interaction of Gal3 and Aβ42, human galectin-3 protein (TrueBinding, QCB200375) was diluted 2-fold in PBS from a concentration of 4 μg/ml and coated a 96-well ELISA plate by adding 80 μl per well. After incubating the plate at 4° C. overnight, the plate was washed with 300 μl PBST three times, followed by a blocking step with 150 μl of 2% BSA in PBST per well and incubated for an hour at room temperature (RT) with gentle rocking. The existing blocking solution was then discarded from the plate. Binding solutions were prepared by 2-fold dilutions of Aβ42 from 4 μg/ml in a 2% buffer of BSA in PBST to a concentration of 4 μg/ml. The Aβ42 dilution was then applied to the plate by adding 60 μl per well column-wise for each galectin-3, then serially diluted two-fold length-wise in 2% BSA in PBST. The plate was incubated for an hour at RT with gentle rocking, then washed with 300 μl PBST three times. Afterwards, HRP-tagged anti-FLAG antibodies were diluted to 1:2000 in 2% BSA in PBST, and 25 μl was added to all the wells. The plate was incubated for 40 minutes at RT with gentle rocking, then washed with 300 μl PBST three times. To develop the plate, 50 μl of ABTS substrate was added to each well and incubated until a sufficiently high signal was achieved. The plate was read in a plate reader at an absorbance of 405 nm. Data was graphed using GraphPad Prism 8.0 software (GraphPad Software Inc).

[1244] FIG. 67 is a table depicting the ability of 33 different anti-Gal3 blocking antibodies to block Gal3 binding to hTB001, hTB006, Aβ42, Aβ40, Aβ42 alpha synuclein, and hTau.

[1245] FIG. 68 is a table depicting the ability of 33 different anti-Gal3 blocking antibodies to block Gal3 binding to hTB006 as measured by Elisa. That is, these antibodies compete for binding to Gal3 with hTB006.

[1246] As can be seen in FIG. 67-68, many anti-Gal3 blocking antibodies are able to compete with one or more anti-Gal3 antibodies for binding to Gal3, binding to Gal3 with at least 80% efficiency. hTB001, hTB006, Aβ42, Aβ40, Aβ42 alpha synuclein, and hTau.

### Example 55: Protein Crystal Sample Preparation and Data Collection

[1247] To determine whether anti-Gal3 blocking antibodies that compete for one or more epitopes as the anti-Gal3 antibodies disclosed herein are suitable for use with the methods of the present disclosure, the crystal structure of hGal3 in complex with TB006 was obtained to determine the binding site between antibody and antigen. XRD is used to solve the proteins 3D structures and determine the binding site between antibody and antigen. Electro density map can be identified when there is stable interaction between antibody and antigen if the protein molecules pack orderly and diffraction resolution is high enough. The distance between two hydrophobic amino acids is in 5 angstroms can be identified as hydrophobic interaction. The distance between two hydrophilic amino acids is within 3.5 angstrom can be identified as hydrogen bond or salt bond interaction. The distance of charged amino acid and aromatic ring of the aromatic amino acid is within 6 angstroms can be identified as cation-π interaction. The distance between two aromatic amino acids is within 4.4 angstroms can be identified as π-π interaction. The XRD data is processed using software suites CCP4, Phenix and COOT. The structure result is demonstrated using software Pymol or Chemira. State-of-art optical microscope (ThermoFisher, Q-Exactive), Liquid nitrogen cylinder (Trajan, compact), Liquid nitrogen storage (Waters, M-Class Acquity), Micro-Tools Set (HAMPTON RESEARCH), Mini-Centrifuge (Sigma-Aldrich), Crystal fishing tools including CrystalCap Systems, CryoLoops, Cryo Tools, Dewars (HAMPTON RESEARCH), Crystal temporary storage pucks and shipping dewars with cooling system (HAMPTON RESEARCH), MilliQ Water (or equivalent).

[1248] The protein to be crystallized was concentrated in PBS solution to 30 to 50 mg/mL. The antibody (Ab) was mixed with the antigen (Ag) in a certain molar ratio for Ab-Ag complex crystals. To screen the crystals, an appropriate volume of solutions from the original crystallization condition screen kits into the crystallization plate well. The protein solution and the crystallization solution were then mixed in a 1:1 ratio. Crystallization condition optimization was then performed. The pH value and precipitants or salts concentration were optimized in a certain range. Additives were screened as necessary. Crystal harvesting was then performed by crystal fishing from the drops. The crystals were fished out from the growth drop, soak in the cryo-protectant solution with the gradient increase of the cryo-protectant reagent such as glycerol for different time accordingly. Once the crystal from the last drop of cryo-protectant solution was fished out, the loop with the crystal was dipped into the liquid nitrogen immediately. The crystal was then mounted into the puck or cap. The crystals were diffracted in SSRL or ALS. Data was collected when the crystal was able to diffract to 3 angstroms. The data was transferred data from SSRL or ALS to a local sever and processed using CCP4 software suites to determine the useful resolution. Phoenix was used to determine the phase and build the model. COOT was used to manually adjust the model. The structure was then analyzed using Pymol or Chemira.

### Example 56: Interaction of TB006 and Gal3

[1249] To determine whether anti-Gal3 blocking antibodies that compete for one or more epitopes as the anti-Gal3 antibodies disclosed herein are suitable for use with the methods of the present disclosure, the structure of TB006 Fab in complex with hGal3 peptide from amino acid 58 to 75 (58′ APPGAYPGAPGAYPGAPA′75) was determined to 1.95 Å. Purified TB006 Fab from nickel resin was applied to Superdex200 in PBS buffer (137 mM NaCl, 27 mM KCl, 10 mM Na2HPO4 and 1.8 mM KH2PO4).

[1250] FIG. 94 shows the isolation of TB006 Fab.

[1251] Fractions from the main peak (FIG. 94a) with relatively high purity (FIG. 94b) were collected and concentrated to 50 mg/mL when assuming the extinction coefficient as 1. Peptide synthesized by ThermoFisher was solubilized with PBS buffer with additional of 100 mM Tris(hydroxymethyl)aminomethane pH 8.0 to a final concentration of 9 mg/mL. 50 mg/mL TB006 Fab and 9 mg/mL hGal3 peptide were mixed in 1:1 ratio (v/v) to screen crystallization conditions. Crystals were applied to synchrotron radiation source crystallized in condition of 40 mM KH2PO4, 16% (w/v) polyethylene glycerol 8000 and 20% glycerol. Diffraction data was collected at Stanford Synchrotron Radiation Lightsource (SSRL) and processed using CCP4 and Phenix software suites. Coordinate file with PDB code 3pp4 was used as model to search the phase solution using Phenix Phaser M R. Structure model was built use Phenix autobuild and adjusted using COOT and refined using Phenix refine. Structures are illustrated using Pymol or Chemira.

[1252] FIG. 95 depicts the crystal structure analysis of TB006 Fab and hGal-3 peptide. FIG. 95a-d depict side view (FIG. 95a and FIG. 95b) and top view (FIG. 95c and FIG. 95d) of overall structure of TB006 Fab in complex with hGal3. Light chain and heavy chain of TB006 Fab are illustrated as depicted in FIG. 95a and FIG. 95b respectively. FIG. 95f and FIG. 95g. depict the interaction interface of TB006 Fab and hGal3 peptide. FIG. 95f depicts detailed amino acids interactions between TB006 Fab light chain and hGal3 peptide. FIG. 95g depicts detailed amino acid interactions between TB006 Fab heavy chain and hGal3 peptide. The black dash indicates hydrogen bond with distance of 3.1 Å. Interactions not highlighted are hydrophobic interaction. Light pink and light blue indicate the light chain and heavy chain respectively. Magentas and marine indicate the CDRs from light chain and heavy chain respectively. hGal3 is showed as green ribbon.

[1253] FIG. 96 depicts a summary of interaction between TB006 Fab and hGal-3 peptide. Dot lines indicate the interactions between CDRs and hGal-3 peptide. Residues highlighted are out of CDR frames.

[1254] The hGal3 peptide lines in the cavity formed by the CDRs from the light chain and heavy chain (FIG. 94a to 94f). 11 amino acids in the peptide are engaged in the interaction with TB006 Fab. Among them, 8 amino acids which are P59 to A62 and G65 to A69 have interaction with the light chain (FIG. 94f). While 7 amino acids which are P60, Y63 to A69 have interaction with heavy chain (FIG. 94g). Most of the interaction are hydrophobic interaction. The detailed interactions are summarized in FIG. 96, simply H51 and Y57 from CDR-L1, R75 from CDR-L2, M116, L117, E118, F119, P120, and L121 from CDR-L3, N31 and Y32 from CDR-H1, A99 and G101 from CDR-H3 are crucial for the Gal3 peptide binding. In addition, some residues out of the CDR, such as light chain Y59, L71, Y74 and heavy chain Y33, H35, W50, were also shown to have interaction with Gal3 peptide.

### Example 57: Neuroserpin—Fenib Aggregation

[1255] To test whether anti-Gal3 antibodies could be utilized to inhibit proteopathies, it was first established using a dot blot that Gal3 is involved in neuroserpin aggregation. Three sets of proteins, 100 μg/ml each of Human Neuroserpin and Gal3 alone or in combinations (Neuroserpin+Gal3), were incubated in phosphate buffer pH 7.4 with continued stirring for the 0-24 hrs time points at room temperature. Oligomerization was assayed using dot blot analysis. 2 μl of each sample was pipetted onto a Whatman nitrocellulose membrane at the appropriate time points (time 0-24 hr) for dot blot probed with conformational oligomer specific antibody A11. After incubating with respective secondary antibodies for 1 h, images were developed using Azure image developer.

[1256] FIG. 43A-B depicts aggregation of neuroserpin incubated at room temperature (RT) with 100 μg of Gal-3 probed with antibody. FIG. 43A depicts 5 hour time course aggregation of neuroserpin as detected by dot blot. FIG. 43B depicts visualization of neuroserpin aggregation with and without Gal-3 as detected using fluorescent microscopy.

[1257] As is clear from FIGS. 43A and 43B, Gal3 promotes aggregation of neuroserpin.

### Example 58: Crystallin Aggregation

[1258] To test whether anti-Gal3 antibodies could be utilized to inhibit proteopathies, it was first established using a dot blot that Gal3 is involved in crystallin aggregation. Three sets of proteins, 100 μg/ml each of Human Crystallin and Gal3 alone or in combinations (Crystallin+Gal3), were incubated in phosphate buffer pH 7.4 with continued stirring for the 0-24 hrs time points at room temperature. Oligomerization was assayed using dot blot analysis. 2 μl of each sample was pipetted onto a Whatman nitrocellulose membrane at the appropriate time points (time 0-24 hr) for dot blot probed with conformational oligomer specific antibody A11. After incubating with respective secondary antibodies for 1 h, images were developed using Azure image developer.

[1259] FIG. 45A-B depicts time course aggregation of Crystallin AA incubated with 100 μg of Gal-3 probed with A11 antibody. FIG. 45A depicts visualization of Crystallin AA aggregation with and without Gal-3 as detected using fluorescent microscopy. FIG. 45B depicts time course aggregation of Crystallin AA incubated with 100 μg of Gal-3 probed with A11 antibody as detected by dot blot.

[1260] FIG. 46A-B depicts time course aggregation of Crystallin AA incubated with 100 μg of Gal-3 probed with A11 antibody. FIG. 46A depicts visualization of Crystallin AB aggregation with and without Gal-3 as detected using fluorescent microscopy. FIG. 46B depicts time course aggregation of Crystallin AB incubated with 100 μg of Gal-3 probed with A11 antibody as detected by dot blot.

[1261] As is clear from FIG. 45-46, Gal3 promotes aggregation of crystallins.

### Example 59: GLUT4-myc Translocation in L6-GLUT4myc Myoblasts

[1262] To test whether anti-Gal3 antibodies could be utilized to inhibit proteopathies, it was first established that Insulin-Gal3 aggregates reduce Glucose Transporter-4 translocation in rat L6 GLUT4-myc myoblasts. Prior to start of assay, Gal3-insulin aggregates were prepared. L6 GLUT4-myc myoblasts cells were trypsinized and added to a 96-well plate in MEM a growth media. The plate was incubated at 37 C until 90-95% confluence was reached. The L6 GLUT4-myc myoblasts were serum starved prior to treatments. In total, 3 treatment conditions were tested: 1) Insulin-Gal 3 Aggregates, 2) control buffer, and 3) Insulin alone. Insulin-Gal 3 Aggregates were tested at 30 ng/mL, 100 ng/mL, and 300 ng/mL. Cells were treated with indicated treatments for 1 hr at 370 C. Insulin stimulation was tested in duplicate. At the end of incubation, indicated wells were treated with Insulin for 20 minutes, washed quickly with ice cold DPBS twice, and fixed with paraformaldehyde. Following fixation, the cells were washed three times with PBS, and blocked with goat serum. The cells were then incubated with anti-myc polyclonal antibody. Following incubation, primary antibody was removed by aspiration and washed with 1×DPBS. The cells were then incubated with goat anti rabbit antibody secondary antibody. Following incubation the secondary antibody was removed by aspiration and the cells were washed with PBS. The cells were then incubated with TMB. 1N HCL was added to stop the reaction and the plate was read at 450 nm.

[1263] Table 4 depicts the optical density measurements, taken in triplicate, fore each of the treatment conditions. Table 5 depicts the quantification of GLUT4 translocation following insulin stimulation. Table 6 depicts the quantification of the percent GLUT4 translocation following insulin stimulation. FIG. 97 is a bar graph illustrating the percentage stimulation results shown in Table 6.

[1264] As is clear from Tables 4-6 and FIG. 97, Gal3+insulin aggregates resulted in reduced GLUT-4 translocation compared to insulin treatment alone.

TABLE 4

| Sr No. | Treatment | OD 1 | OD 2 | OD 3 |
|---|---|---|---|---|
| 1 | Aggregates 300 | 0.1668 | 0.1581 | 0.1589 |
| 2 | Aggregates 300 + Insulin | 0.1217 | 0.1571 | 0.1728 |
| 3 | Aggregates 30 | 0.1442 | 0.1715 | 0.1472 |
| 4 | Aggregates 30 + Insulin | 0.1995 | 0.174 | 0.203 |
| 7 | Aggregates 100 | 0.16 | 0.1423 | 0.1322 |
| 8 | Aggregates 100 + Insulin | 0.1561 | 0.1894 | 0.1577 |
| 9 | Control | 0.1276 | 0.1376 | 0.1224 |
| 10 | Control + Insulin | 0.1926 | 0.1986 | 0.1529 |

TABLE 5

| | | Stimulation | Stimulation | Stimulation |
|---|---|---|---|---|
| Sr No. | Treatment | 1 | 2 | 3 |
| 1 | Aggregates 300 | 0.729616307 | 0.993674889 | 1.0874764 |
| 2 | Aggregates 300 + Insulin | | | |
| 3 | Aggregates 30 | 1.383495146 | 1.014577259 | 1.379076087 |
| 4 | Aggregates 30 + Insulin | | | |
| 7 | Aggregates 100 | 0.975625 | 1.330990864 | 1.192889561 |
| 8 | Aggregates 100 + Insulin | | | |
| 9 | Control | 1.509404389 | 1.443313953 | 1.249183007 |
| 10 | Control + Insulin | | | |

TABLE 6

| | | % | % | % |
|---|---|---|---|---|
| | | Stimulation | Stimulation | Stimulation |
| Sr No. | Treatment | 1 | 2 | 3 |
| 1 | Aggregates 300 | 52.07825175 | 70.9261163 | 77.62144185 |
| 2 | Aggregates 300 + Insulin | | | |
| 3 | Aggregates 30 | 98.75054573 | 72.41807705 | 98.43512398 |
| 4 | Aggregates 30 + Insulin | | | |
| 7 | Aggregates 100 | 69.63775874 | 95.0029168 | 85.14557896 |
| 8 | Aggregates 100 + Insulin | | | |
| 9 | Control | 107.7376437 | 103.0202679 | 89.16366927 |
| 10 | Control + Insulin | | | |

[1265] In at least some of the previously described embodiments, one or more elements used in an embodiment can interchangeably be used in another embodiment unless such a replacement is not technically feasible. It will be appreciated by those skilled in the art that various other omissions, additions and modifications may be made to the methods and structures described above without departing from the scope of the claimed subject matter. All such modifications and changes are intended to fall within the scope of the subject matter, as defined by the appended claims.

[1266] With respect to the use of substantially any plural and/or singular terms herein, those having skill in the art can translate from the plural to the singular and/or from the singular to the plural as is appropriate to the context and/or application. The various singular/plural permutations may be expressly set forth herein for sake of clarity.

[1267] It will be understood by those within the art that, in general, terms used herein, and especially in the appended claims (e.g., bodies of the appended claims) are generally intended as “open” terms (e.g., the term “including” should be interpreted as “including but not limited to,” the term “having” should be interpreted as “having at least,” the term “includes” should be interpreted as “includes but is not limited to,” etc.). It will be further understood by those within the art that if a specific number of an introduced claim recitation is intended, such an intent will be explicitly recited in the claim, and in the absence of such recitation no such intent is present. For example, as an aid to understanding, the following appended claims may contain usage of the introductory phrases “at least one” and “one or more” to introduce claim recitations. However, the use of such phrases should not be construed to imply that the introduction of a claim recitation by the indefinite articles “a” or “an” limits any particular claim containing such introduced claim recitation to embodiments containing only one such recitation, even when the same claim includes the introductory phrases “one or more” or “at least one” and indefinite articles such as “a” or “an” (e.g., “a” and/or “an” should be interpreted to mean “at least one” or “one or more”); the same holds true for the use of definite articles used to introduce claim recitations. In addition, even if a specific number of an introduced claim recitation is explicitly recited, those skilled in the art will recognize that such recitation should be interpreted to mean at least the recited number (e.g., the bare recitation of “two recitations,” without other modifiers, means at least two recitations, or two or more recitations). Furthermore, in those instances where a convention analogous to “at least one of A, B, and C, etc.” is used, in general such a construction is intended in the sense one having skill in the art would understand the convention (e.g., “a system having at least one of A, B, and C” would include but not be limited to systems that have A alone, B alone, C alone, A and B together, A and C together, B and C together, and/or A, B, and C together, etc.). In those instances where a convention analogous to “at least one of A, B, or C, etc.” is used, in general such a construction is intended in the sense one having skill in the art would understand the convention (e.g., “a system having at least one of A, B, or C” would include but not be limited to systems that have A alone, B alone, C alone, A and B together, A and C together, B and C together, and/or A, B, and C together, etc.). It will be further understood by those within the art that virtually any disjunctive word and/or phrase presenting two or more alternative terms, whether in the description, claims, or drawings, should be understood to contemplate the possibilities of including one of the terms, either of the terms, or both terms. For example, the phrase “A or B” will be understood to include the possibilities of “A” or “B” or “A and B.”

[1268] In addition, where features or aspects of the disclosure are described in terms of Markush groups, those skilled in the art will recognize that the disclosure is also thereby described in terms of any individual member or subgroup of members of the Markush group.

[1269] As will be understood by one skilled in the art, for any and all purposes, such as in terms of providing a written description, all ranges disclosed herein also encompass any and all possible sub-ranges and combinations of sub-ranges thereof. Any listed range can be easily recognized as sufficiently describing and enabling the same range being broken down into at least equal halves, thirds, quarters, fifths, tenths, etc. As a non-limiting example, each range discussed herein can be readily broken down into a lower third, middle third and upper third, etc. As will also be understood by one skilled in the art all language such as “up to,” “at least,” “greater than,” “less than,” and the like include the number recited and refer to ranges which can be subsequently broken down into sub-ranges as discussed above. Finally, as will be understood by one skilled in the art, a range includes each individual member. Thus, for example, a group having 1-3 articles refers to groups having 1, 2, or 3 articles. Similarly, a group having 1-5 articles refers to groups having 1, 2, 3, 4, or 5 articles, and so forth.

[1270] While various aspects and embodiments have been disclosed herein, other aspects and embodiments will be apparent to those skilled in the art. The various aspects and embodiments disclosed herein are for purposes of illustration and are not intended to be limiting, with the true scope and spirit being indicated by the following claims.

[1271] A Sequence Listing in electronic format is submitted herewith. Some of the sequences provided in the Sequence Listing may be designated as Artificial Sequences by virtue of being non-naturally occurring fragments or portions of other sequences, including naturally occurring sequences. Some of the sequences provided in the Sequence Listing may be designated as Artificial Sequences by virtue of being combinations of sequences from different origins, such as humanized antibody sequences.

[1272] All references cited herein, including but not limited to published and unpublished applications, patents, and literature references, are incorporated herein by reference in their entirety and are hereby made a part of this specification. To the extent publications and patents or patent applications incorporated by reference contradict the disclosure contained in the specification, the specification is intended to supersede and/or take precedence over any such contradictory material.

1. A method of inhibiting Gal3-mediated amyloid aggregation of a protein, comprising:
contacting the protein with an anti-Gal3 antibody or binding fragment thereof,
wherein binding of the anti-Gal3 antibody or binding fragment thereof to Gal3 inhibits Gal3-mediated amyloid aggregation of the protein.

2. A method of inhibiting Gal3-mediated oligomerization of a protein, comprising:
contacting the protein with an anti-Gal3 antibody or binding fragment thereof,
wherein binding of the anti-Gal3 antibody or binding fragment thereof to Gal3 inhibits Gal3-mediated oligomerization of the protein.

3. A method of treating an amyloid proteopathy in a subject in need thereof, comprising:
administering to the subject an anti-Gal3 antibody or binding fragment thereof, wherein
binding of the anti-Gal3 antibody or binding fragment thereof to Gal3 in the subject inhibits Gal3-mediated amyloid aggregation of a protein in the subject, thereby treating the amyloid proteopathy in the subject.

4-36. (canceled)

37. The method of claim 1, wherein Gal3-mediated amyloid aggregation or oligomerization of the protein is inhibited by at least 5%, 10%, 15%, 20%, 25%, 30%, 35%, 40%, 45%, 50%, 55%, 60%, 65%, 70%, 75%, 80%, 85%, 90%, 95%, or 99% after contacting with the anti-Gal3 antibody or binding fragment thereof relative to a cell that is not contacted with the anti-Gal3 antibody or binding fragment thereof.

38. The method of claim 1, wherein the protein comprises α-synuclein, tau protein, TDP-43, transthyretin, uromodulin, islet amyloid polypeptide (IAPP), serum amyloid A (SAA), p53, apolipoprotein E (APOE), APOE-4, prion protein, fibrin, or neurofilament light (NFL), CRP, SUMO, light chain, platelet-derived growth factor receptor (PDGFR), melanoma cell adhesion molecule (MCAM), complement proteins C3 and/or C9, lysozyme, insulin, native haemoglobin (Hb), glycosylated haemoglobin (HbAIC), phenylalanine (Phe), glutamine (Gln), cholesteryl (co-esteryl), cholesterol, neuroserpin, Crystallin AA and/or Crystallin AB, cystatin-C, or myostatin propeptide, and/or any combination thereof.

39. The method of claim 3, wherein identifying the subject as needing treatment of the proteopathy and/or amyloid proteopathy and/or detecting the improvement in the amyloid proteopathy is done by biopsy, blood or urine test, echocardiogram, or technetium pyrophosphate (99mTc-PYP) scintigraphy.

40. The method of claim 3, wherein the proteopathy and/or amyloid proteopathy is reduced by at least 5%, 10%, 15%, 20%, 25%, 30%, 35%, 40%, 45%, 50%, 55%, 60%, 65%, 70%, 75%, 80%, 85%, 90%, 95%, or 99% after the administering step relative to the amyloid proteopathy prior to the administering step.

41. The method of claim 3, wherein the protein comprises α-synuclein, tau protein, TDP-43, transthyretin, uromodulin, islet amyloid polypeptide (IAPP), serum amyloid A (SAA), p53, apolipoprotein E (APOE), APOE-4, prion protein, fibrin, or neurofilament light (NFL), CRP, SUMO, light chain, platelet-derived growth factor receptor (PDGFR), melanoma cell adhesion molecule (MCAM), complement proteins C3 and/or C9, lysozyme, insulin, native haemoglobin (Hb), glycosylated haemoglobin (HbAIC), phenylalanine (Phe), glutamine (Gln), cholesteryl (co-esteryl), cholesterol, neuroserpin, Crystallin AA and/or Crystallin AB, cystatin-C, or myostatin propeptide, and/or any combination thereof.

42. The method of claim 41, wherein the proteopathy and/or amyloid proteopathy comprises a synucleinopathy, Parkinson's disease, dementia with Lewy bodies, multiple system atrophy, tauopathy, Alzheimer's disease, progressive supranuclear palsy, corticobasal degeneration, Pick's disease, TDP-43 proteopathy, amyotrophic lateral sclerosis, frontotemporal lobar degeneration, TTR amyloidosis (ATTR), cardiac amyloidosis, uromodulin-associated kidney disease, IAPP amyloidosis, SAA amyloidosis, rheumatoid arthritis, inflammatory arthritis, spondyloarthropathies, juvenile idiopathic arthritis, ankylosing spondylitis, psoriatic arthritis, inflammatory bowel disease, ulcerative colitis, Crohn's disease, celiac disease, vasculitis, sarcoidosis, familial Mediterranean fever, tumor necrosis factor receptor-associated periodic syndrome (TRAPS), cancer, aging promoted by amyloid aggregation or any combination thereof.

43. The method of claim 1, wherein the anti-Gal3 antibody or binding fragment thereof comprises (1) a heavy chain variable region comprising a V_{H}-CDR1, a V_{H}-CDR2, and a V_{H}-CDR3; and (2) a light chain variable region comprising a V_{L}-CDR1, a V_{L}-CDR2, and a V_{L}-CDR3, wherein
the V_{H}-CDR1 comprises an amino acid sequence having at least 80%, 81%, 82%, 83%, 84%, 85%, 86%, 87%, 88%, 89%, 90%, 91%, 92%, 93%, 94%, 95%, 96%, 97%, 98%, 99%, or 100% identity to any one of the amino acid sequences of SEQ ID NOs: 27-70;
the V_{H}-CDR2 comprises an amino acid sequence having at least 80%, 81%, 82%, 83%, 84%, 85%, 86%, 87%, 88%, 89%, 90%, 91%, 92%, 93%, 94%, 95%, 96%, 97%, 98%, 99%, or 100% identity to any one of the amino acid sequences of SEQ ID NOs: 71-111, 801, 951, 952;
the V_{H}-CDR3 comprises an amino acid sequence having at least 80%, 81%, 82%, 83%, 84%, 85%, 86%, 87%, 88%, 89%, 90%, 91%, 92%, 93%, 94%, 95%, 96%, 97%, 98%, 99%, or 100% identity to any one of the amino acid sequences of SEQ ID NO: 112-169, 802, 953, 954;
the V_{L}-CDR1 comprises an amino acid sequence having at least 80%, 81%, 82%, 83%, 84%, 85%, 86%, 87%, 88%, 89%, 90%, 91%, 92%, 93%, 94%, 95%, 96%, 97%, 98%, 99%, or 100% identity to any one of the amino acid sequences of SEQ ID NOs: 170-220;
the V_{L}-CDR2 comprises an amino acid sequence having at least 80%, 81%, 82%, 83%, 84%, 85%, 86%, 87%, 88%, 89%, 90%, 91%, 92%, 93%, 94%, 95%, 96%, 97%, 98%, 99%, or 100% identity to any one of the amino acid sequences of SEQ ID NOs: 211-247; and
the V_{L}-CDR3 comprises an amino acid sequence having at least 80%, 81%, 82%, 83%, 84%, 85%, 86%, 87%, 88%, 89%, 90%, 91%, 92%, 93%, 94%, 95%, 96%, 97%, 98%, 99%, or 100% identity to any one of the amino acid sequences of SEQ ID NOs: 248-296; or wherein the antibody or binding fragment thereof comprises a blocking antibody that competes for binding with any one or more of the preceding anti-Gal3 antibodies or binding fragments thereof, wherein the blocking antibody is at least 80% effective at outcompeting the anti-Gal3 antibody or binding fragment thereof.

44. The method of claim 1, wherein the anti-Gal3 antibody or binding fragment thereof comprises a combination of the V_{H}-CDR1, V_{H}-CDR2, V_{H}-CDR3, V_{L}-CDR1, V_{L}-CDR2, and V_{L}-CDR3 as illustrated in FIG. 13; or wherein the antibody or binding fragment thereof comprises a blocking antibody that competes for binding with any one or more of the preceding anti-Gal3 antibodies or binding fragments thereof, wherein the blocking antibody is at least 80% effective at outcompeting the anti-Gal3 antibody or binding fragment thereof.

45. The method of claim 1, wherein the heavy chain variable region comprises a sequence having at least 80%, 81%, 82%, 83%, 84%, 85%, 86%, 87%, 88%, 89%, 90%, 91%, 92%, 93%, 94%, 95%, 96%, 97%, 98%, or 99% identity to the sequence selected from SEQ ID NOs: 297-373, 803, 806-820, 940, 955-968, 1067-1109, 1415-1439; or wherein the antibody or binding fragment thereof comprises a blocking antibody that competes for binding with any one or more of the preceding anti-Gal3 antibodies or binding fragments thereof, wherein the blocking antibody is at least 80% effective at outcompeting the anti-Gal3 antibody or binding fragment thereof.

46. The method of claim 1, wherein the light chain variable region comprises a sequence having at least 80%, 81%, 82%, 83%, 84%, 85%, 86%, 87%, 88%, 89%, 90%, 91%, 92%, 93%, 94%, 95%, 96%, 97%, 98%, or 99% identity to the sequence selected from SEQ ID NOs: 374-447, 821-835, 941-943, 969-982, 1110-1152, 1440-1464; or wherein the antibody or binding fragment thereof comprises a blocking antibody that competes for binding with any one or more of the preceding anti-Gal3 antibodies or binding fragments thereof, wherein the blocking antibody is at least 80% effective at outcompeting the anti-Gal3 antibody or binding fragment thereof.

47. The method of claim 1, wherein the anti-Gal3 antibody or binding fragment thereof comprises a heavy chain, wherein the heavy chain comprises a sequence having at least 80%, 81%, 82%, 83%, 84%, 85%, 86%, 87%, 88%, 89%, 90%, 91%, 92%, 93%, 94%, 95%, 96%, 97%, 98%, or 99% identity to the sequence selected from SEQ ID NOs: 448-494, 804, 836-850, 983-996, 1153-1195, 1411, 1465-1489; or wherein the antibody or binding fragment thereof comprises a blocking antibody that competes for binding with any one or more of the preceding anti-Gal3 antibodies or binding fragments thereof, wherein the blocking antibody is at least 80% effective at outcompeting the anti-Gal3 antibody or binding fragment thereof.

48. The method of claim 1, wherein the anti-Gal3 antibody or binding fragment thereof comprises a light chain, wherein the light chain comprises a sequence having at least 80%, 81%, 82%, 83%, 84%, 85%, 86%, 87%, 88%, 89%, 90%, 91%, 92%, 93%, 94%, 95%, 96%, 97%, 98%, or 99% identity to the sequence selected from SEQ ID NOs: 495-538, 805, 851-865, 997-1010, 1196-1238, 1412, 1490-1514; or wherein the antibody or binding fragment thereof comprises a blocking antibody that competes for binding with any one or more of the preceding anti-Gal3 antibodies or binding fragments thereof, wherein the blocking antibody is at least 80% effective at outcompeting the anti-Gal3 antibody or binding fragment thereof.

49. The method of claim 1, wherein the anti-Gal3 antibody or binding fragment thereof is selected from the group consisting of at least one of: TB001, TB006, 12G5.D7, 13A12.2E5, 14H10.2C9, 15F10.2D6, 19B5.2E6, 20D11.2C6, 20H5.A3, 23H9.2E4, 2D10.2B2, 3B11.2G2, 7D8.2D8, mIMT001, 4A11.2B5, 4A11.H1L1, 4A11.H4L2, 4G2.2G6, 6B3.2D3, 6H6.2D6, 9H2.2H10, 13G4.2F8, 13H12.2F8, 15G7.2A7, 19D9.2E5, 23B10.2B12, 24D12.2H9, F846C.1B2, F846C.1F5, F846C.1H12, F846C.1H5, F846C.2H3, F846TC.14A2, F846TC.14E4, F846TC.16B5, F846TC.7F10, F847C.10B9, F847C.11B1, F847C.12F12, F847C.26F5, F847C.4B10, F849C.8D10, F849C.8H3, 846.2B11, 846.4D5, 846T.1H2, 847.14H4, 846.2D4, 846.2F11, 846T.10B1, 846T.2E3, 846T.4C9, 846T.4E11, 846T.4F5, 846T.8D1, 847.10C9, 847.11D6, 847.15D12, 847.15F9, 847.15H11, 847.20H7, 847.21B11, 847.27B9, 847.28D1, 847.2B8, 847.3B3, 849.1D2, 849.2D7, 849.2F12, 849.4B2, 849.4F12, 849.4F2, 849.5C2, 849.8D12, F847C.21H6, 849.5H1, 847.23F11, 847.16D10, 847.13E2-mH0mL1, 847.13E2-mH0mL2, 847.12C4, 847.4D3, 2D10-VH0-VL0, 2D10-hVH4-HVL1, 2D10-hVH4-HVL2, 2D10-hVH4-HVL3, 2D10-hVH4-HVL4, 2D10-hVH3-HVL1, 2D10-hVH3-HVL2, 2D10-hVH3-HVL3, 2D10-hVH3-HVL4, 20H5.A3-VH3VL1, 20H5.A3-VH3VL3, 20H5.A3-VH4VL1, 20H5.A3-VL5VL1, 20H5.A3-VH5VL3, 20H5.A3-VH6VL1, 20H5.A3-VH6VL3, 2D10-VH0-VL0, 2D10-hVH4-HVL1, 2D10-hVH4-HVL2, 2D10-hVH4-HVL3, 2D10-hVH4-HVL4, 2D10-hVH3-HVL1, 2D10-hVH3-HVL2, 2D10-hVH3-HVL3, 2D10-hVH3-HVL4, 21H6-H0L0, 21H6-H1L1, 21H6-H1L2, 21H6-H1L3, 21H6-H1L4, 21H6-H2L1, 21H6-H2L2, 21H6-H2L3, 21H6-H2L4, 21H6-H3L1, 21H6-H3L2, 21H6-H3L3, 21H6-H3L4, 21H6-H4L1, 21H6-H4L2, 21H6-H4L3, 21H6-H4L4, 21H6-H5L1, 21H6-H5L2, 21H6-H5L3, 21H6-H5L4, 21H6-H6L1, 21H6-H6L2, 21H6-H6L3, 21H6-H6L4 or binding fragment thereof; or wherein the antibody or binding fragment thereof comprises a blocking antibody that competes for binding with any one or more of the preceding anti-Gal3 antibodies or binding fragments thereof, wherein the blocking antibody is at least 80% effective at outcompeting the anti-Gal3 antibody or binding fragment thereof.

50. The method of claim 43, wherein 80% effectiveness at outcompeting the anti-Gal3 antibody or binding fragment thereof is determined as follows:
A) Ab diluted 2-fold in PBS from a concentration of 4 μg/ml and coated a 96-well ELISA plate by adding 80 μl per well;
B) After incubating the plate at 4° C. overnight, the plate is washed with 300 μl PBST three times, followed by a blocking step with 150 μl of 2% BSA in PBST per well and incubated for an hour at room temperature (RT) with gentle rocking;
C) Binding solutions are prepared by 2-fold dilutions from 4 μg/ml in a 2% buffer of BSA in PBST to a concentration of 4 μg/ml;
D) The dilution is then applied to the plate by adding 60 μl per well column-wise for each galectin-3, then serially diluted two-fold length-wise in 2% BSA in PBST;
E) The plate is incubated for an hour at RT with gentle rocking, then washed with 300 μl PBST three times;
F) Afterwards, HRP-tagged anti-FLAG antibodies are diluted to 1:2000 in 2% BSA in PBST, and 25 μl is added to all the wells
G) The plate is incubated for 40 minutes at RT with gentle rocking, then washed with 300 μl PBST three times;
H) To develop the plate, 50 μl of ABTS substrate is added to each well and incubated until a sufficiently high signal was achieved;
I) The plate is read in a plate reader at an absorbance of 405 nm; and optionally,
J) Data can be graphed using GraphPad Prism 8.0 software (GraphPad Software Inc).

51. The method of claim 1, wherein the protein is selected from amyloid β40 and amyloid β42.

52. The method of claim 1, wherein the protein is selected from alpha synuclein, APOE-4, cholesterol, insulin, IAPP, transthyretin, crystallins, atrial natriuretic peptide (ANP) and B-Type Natriuretic Peptide (BNP).

The application's sequence listing, which the Patent Office published only in electronic form, follows.

SEQUENCE LISTING (1914 sequences)

SEQ ID NO: 1 - protein, 250 aa, Homo sapiens [sequence omitted]

SEQ ID NO: 2 - protein, 264 aa, Homo sapiens
MHSKTPCGCFKPWKMADNFSLHDALSGSGNPNPQGWPGAWGNQPAGAGGYPGASYPGAYPGQAPPGAYPGQAPPGAYPGAPGAYPGAPAPGVYPGPPSGPGAYPSSGQPSATGAYPATGPYGAPAGPLIVPYNLPLPGGVVPRMLITILGTVKPNANRIALDFQRGNDVAFHFNPRFNENNRRVIVCNTKLDNNWGREERQSVFPFESGKPFKIQVLVEPDHFKVAVNDAHLLQYNHRVKKLNEISKLGISGDIDLTSASYTMI

SEQ ID NO: 3 - protein, 20 aa, synthetic construct
  REGION 1..20: note = Gal3 Peptide 1
ADNFSLHDALSGSGNPNPQG

SEQ ID NO: 4 - protein, 20 aa, synthetic construct
  REGION 1..20: note = Gal3 Peptide 2
SGSGNPNPQGWPGAWGNQPA

SEQ ID NO: 5 - protein, 20 aa, synthetic construct
  REGION 1..20: note = Gal3 Peptide 3
WPGAWGNQPAGAGGYPGASY

SEQ ID NO: 6 - protein, 20 aa, synthetic construct
  REGION 1..20: note = Gal3 Peptide 4
GAGGYPGASYPGAYPGQAPP

SEQ ID NO: 7 - protein, 20 aa, synthetic construct
  REGION 1..20: note = Gal3 Peptide 5
PGAYPGQAPPGAYPGQAPPG

SEQ ID NO: 8 - protein, 20 aa, synthetic construct
  REGION 1..20: note = Gal3 Peptide 6
GAYPGQAPPGAYPGAPGAYP

SEQ ID NO: 9 - protein, 20 aa, synthetic construct
  REGION 1..20: note = Gal3 Peptide 7
AYPGAPGAYPGAPAPGVYPG

SEQ ID NO: 10 - protein, 20 aa, synthetic construct
  REGION 1..20: note = Gal3 Peptide 8
GAPAPGVYPGPPSGPGAYPS

SEQ ID NO: 11 - protein, 20 aa, synthetic construct
  REGION 1..20: note = Gal3 Peptide 9
PPSGPGAYPSSGQPSATGAY

SEQ ID NO: 12 - protein, 20 aa, synthetic construct
  REGION 1..20: note = Gal3 Peptide 10
SGQPSATGAYPATGPYGAPA

SEQ ID NO: 13 - protein, 20 aa, synthetic construct
  REGION 1..20: note = Gal3 Peptide 11
PATGPYGAPAGPLIVPYNLP

SEQ ID NO: 14 - protein, 20 aa, synthetic construct
  REGION 1..20: note = Gal3 Peptide 12
GPLIVPYNLPLPGGVVPRML

SEQ ID NO: 15 - protein, 20 aa, synthetic construct
  REGION 1..20: note = Gal3 Peptide 13
LPGGVVPRMLITILGTVKPN

SEQ ID NO: 16 - protein, 20 aa, synthetic construct
  REGION 1..20: note = Gal3 Peptide 14
ITILGTVKPNANRIALDFQR

SEQ ID NO: 17 - protein, 20 aa, synthetic construct
  REGION 1..20: note = Gal3 Peptide 15
ANRIALDFQRGNDVAFHFNP

SEQ ID NO: 18 - protein, 20 aa, synthetic construct
  REGION 1..20: note = Gal3 Peptide 16
GNDVAFHFNPRFNENNRRVI

SEQ ID NO: 19 - protein, 20 aa, synthetic construct
  REGION 1..20: note = Gal3 Peptide 17
RFNENNRRVIVCNTKLDNNW

SEQ ID NO: 20 - protein, 20 aa, synthetic construct
  REGION 1..20: note = Gal3 Peptide 18
VCNTKLDNNWGREERQSVFP

SEQ ID NO: 21 - protein, 20 aa, synthetic construct
  REGION 1..20: note = Gal3 Peptide 19
GREERQSVFPFESGKPFKIQ

SEQ ID NO: 22 - protein, 20 aa, synthetic construct
  REGION 1..20: note = Gal3 Peptide 20
FESGKPFKIQVLVEPDHFKV

SEQ ID NO: 23 - protein, 20 aa, synthetic construct
  REGION 1..20: note = Gal3 Peptide 21
VLVEPDHFKVAVNDAHLLQY

SEQ ID NO: 24 - protein, 20 aa, synthetic construct
  REGION 1..20: note = Gal3 Peptide 22
AVNDAHLLQYNHRVKKLNEI

SEQ ID NO: 25 - protein, 20 aa, synthetic construct
  REGION 1..20: note = Gal3 Peptide 23
NHRVKKLNEISKLGISGDID

SEQ ID NO: 26 - protein, 19 aa, synthetic construct
  REGION 1..19: note = Gal3 Peptide 24
SKLGISGDIDLTSASYTMI

SEQ ID NO: 27 - protein, 7 aa, synthetic construct
  REGION 1..7: note = VH_CDR1_1
GYTFTNY

SEQ ID NO: 28 - protein, 7 aa, synthetic construct
  REGION 1..7: note = VH_CDR1_2
GFSLTSY

SEQ ID NO: 29 - protein, 8 aa, synthetic construct
  REGION 1..8: note = VH_CDR1_3
GYTFTNYW

SEQ ID NO: 30 - protein, 8 aa, synthetic construct
  REGION 1..8: note = VH_CDR1_4
GYTFTNYG

SEQ ID NO: 31 - protein, 7 aa, synthetic construct
  REGION 1..7: note = VH_CDR1_5
GYSFTNY

SEQ ID NO: 32 - protein, 7 aa, synthetic construct
  REGION 1..7: note = VH_CDR1_6
GYTFTDY

SEQ ID NO: 33 - protein, 7 aa, synthetic construct
  REGION 1..7: note = VH_CDR1_7
GYKFKTY

SEQ ID NO: 34 - protein, 7 aa, synthetic construct
  REGION 1..7: note = VH_CDR1_8
GYTFTTY

SEQ ID NO: 35 - protein, 7 aa, synthetic construct
  REGION 1..7: note = VH_CDR1_9
GFAFSSY

SEQ ID NO: 36 - protein, 7 aa, synthetic construct
  REGION 1..7: note = VH_CDR1_10
GYTFTDF

SEQ ID NO: 37 - protein, 7 aa, synthetic construct
  REGION 1..7: note = VH_CDR1_11
GYAFTTY

SEQ ID NO: 38 - protein, 7 aa, synthetic construct
  REGION 1..7: note = VH_CDR1_12
GFTFSSY

SEQ ID NO: 39 - protein, 8 aa, synthetic construct
  REGION 1..8: note = VH_CDR1_13
GFSLTSYG

SEQ ID NO: 40 - protein, 7 aa, synthetic construct
  REGION 1..7: note = VH_CDR1_14
GYTFTSY

SEQ ID NO: 41 - protein, 7 aa, synthetic construct
  REGION 1..7: note = VH_CDR1_15
GYTFSDY

SEQ ID NO: 42 - protein, 8 aa, synthetic construct
  REGION 1..8: note = VH_CDR1_16
GYTFTNFG

SEQ ID NO: 43 - protein, 8 aa, synthetic construct
  REGION 1..8: note = VH_CDR1_17
GFTFSSYA

SEQ ID NO: 44 - protein, 10 aa, synthetic construct
  REGION 1..10: note = VH_CDR1_18
GFSLSTSGMG

SEQ ID NO: 45 - protein, 8 aa, synthetic construct
  REGION 1..8: note = VH_CDR1_19
GFTFSNYG

SEQ ID NO: 46 - protein, 8 aa, synthetic construct
  REGION 1..8: note = VH_CDR1_20
GYIFTNYG

SEQ ID NO: 47 - protein, 8 aa, synthetic construct
  REGION 1..8: note = VH_CDR1_21
GNTFTDHN

SEQ ID NO: 48 - protein, 8 aa, synthetic construct
  REGION 1..8: note = VH_CDR1_22
GYTFTSYW

SEQ ID NO: 49 - protein, 10 aa, synthetic construct
  REGION 1..10: note = VH_CDR1_23
GFSLSTFGMG

SEQ ID NO: 50 - protein, 8 aa, synthetic construct
  REGION 1..8: note = VH_CDR1_24
GYTFTSYD

SEQ ID NO: 51 - protein, 8 aa, synthetic construct
  REGION 1..8: note = VH_CDR1_25
GFTFSNYW

SEQ ID NO: 52 - protein, 8 aa, synthetic construct
  REGION 1..8: note = VH_CDR1_26
GYTFTSYV

SEQ ID NO: 53 - protein, 8 aa, synthetic construct
  REGION 1..8: note = VH_CDR1_27
GYSFTNYI

SEQ ID NO: 54 - protein, 8 aa, synthetic construct
  REGION 1..8: note = VH_CDR1_28
GYTFRSYD

SEQ ID NO: 55 - protein, 8 aa, synthetic construct
  REGION 1..8: note = VH_CDR1_29
GFTFSNFW

SEQ ID NO: 56 - protein, 8 aa, synthetic construct
  REGION 1..8: note = VH_CDR1_30
EYAFNNYM

SEQ ID NO: 57 - protein, 8 aa, synthetic construct
  REGION 1..8: note = VH_CDR1_31
GYSFTGYT

SEQ ID NO: 58 - protein, 8 aa, synthetic construct
  REGION 1..8: note = VH_CDR1_32
GFSLINYG

SEQ ID NO: 59 - protein, 8 aa, synthetic construct
  REGION 1..8: note = VH_CDR1_33
GYTFNNYW

SEQ ID NO: 60 - protein, 8 aa, synthetic construct
  REGION 1..8: note = VH_CDR1_34
GFSLSSYG

SEQ ID NO: 61 - protein, 8 aa, synthetic construct
  REGION 1..8: note = VH_CDR1_35
GYSFTNYW

SEQ ID NO: 62 - protein, 8 aa, synthetic construct
  REGION 1..8: note = VH_CDR1_36
GYSFTSYW

SEQ ID NO: 63 - protein, 9 aa, synthetic construct
  REGION 1..9: note = VH_CDR1_37
GYSITSGYY

SEQ ID NO: 64 - protein, 8 aa, synthetic construct
  REGION 1..8: note = VH_CDR1_38
GFNIKDYY

SEQ ID NO: 65 - protein, 8 aa, synthetic construct
  REGION 1..8: note = VH_CDR1_39
RYTFTDYN

SEQ ID NO: 66 - protein, 8 aa, synthetic construct
  REGION 1..8: note = VH_CDR1_40
GYTFTIFG

SEQ ID NO: 67 - protein, 8 aa, synthetic construct
  REGION 1..8: note = VH_CDR1_41
GYTFTSSW

SEQ ID NO: 68 - protein, 8 aa, synthetic construct
  REGION 1..8: note = VH_CDR1_42
GYTFTGYW

SEQ ID NO: 69 - protein, 8 aa, synthetic construct
  REGION 1..8: note = VH_CDR1_43
GYSFTDYN

SEQ ID NO: 70 - protein, 8 aa, synthetic construct
  REGION 1..8: note = VH_CDR1_44
GFSLTIYG

SEQ ID NO: 71 - protein, 6 aa, synthetic construct
  REGION 1..6: note = VH_CDR2_1
NTNTGE

SEQ ID NO: 72 - protein, 8 aa, synthetic construct
  REGION 1..8: note = VH_CDR2_2
IYPGSGNT

SEQ ID NO: 73 - protein, 8 aa, synthetic construct
  REGION 1..8: note = VH_CDR2_3
IYPGTGNT

SEQ ID NO: 74 - protein, 8 aa, synthetic construct
  REGION 1..8: note = VH_CDR2_4
INTYSGVP

SEQ ID NO: 75 - protein, 8 aa, synthetic construct
  REGION 1..8: note = VH_CDR2_5
ISDGGVYT

SEQ ID NO: 76 - protein, 8 aa, synthetic construct
  REGION 1..8: note = VH_CDR2_6
INPKNGGI

SEQ ID NO: 77 - protein, 8 aa, synthetic construct
  REGION 1..8: note = VH_CDR2_7
VNTYSGVP

SEQ ID NO: 78 - protein, 8 aa, synthetic construct
  REGION 1..8: note = VH_CDR2_8
IYPGSNDT

SEQ ID NO: 79 - protein, 8 aa, synthetic construct
  REGION 1..8: note = VH_CDR2_9
ISDGGIYT

SEQ ID NO: 80 - protein, 8 aa, synthetic construct
  REGION 1..8: note = VH_CDR2_10
INTHSGVP

SEQ ID NO: 81 - protein, 7 aa, synthetic construct
  REGION 1..7: note = VH_CDR2_11
IWSGGST

SEQ ID NO: 82 - protein, 8 aa, synthetic construct
  REGION 1..8: note = VH_CDR2_12
IDPSDSET

SEQ ID NO: 83 - protein, 8 aa, synthetic construct
  REGION 1..8: note = VH_CDR2_13
IHPNSGST

SEQ ID NO: 84 - protein, 8 aa, synthetic construct
  REGION 1..8: note = VH_CDR2_14
INPNNGGT

SEQ ID NO: 85 - protein, 8 aa, synthetic construct
  REGION 1..8: note = VH_CDR2_15
IYPVSVNT

SEQ ID NO: 86 - protein, 8 aa, synthetic construct
  REGION 1..8: note = VH_CDR2_16
INTYTGEP

SEQ ID NO: 87 - protein, 7 aa, synthetic construct
  REGION 1..7: note = VH_CDR2_17
ISSGGDT

SEQ ID NO: 88 - protein, 7 aa, synthetic construct
  REGION 1..7: note = VH_CDR2_18
IWWDDDK

SEQ ID NO: 89 - protein, 8 aa, synthetic construct
  REGION 1..8: note = VH_CDR2_19
ISSGGSYT

SEQ ID NO: 90 - protein, 8 aa, synthetic construct
  REGION 1..8: note = VH_CDR2_20
IYPYNGGT

SEQ ID NO: 91 - protein, 7 aa, synthetic construct
  REGION 1..7: note = VH_CDR2_21
ISSGGST

SEQ ID NO: 92 - protein, 8 aa, synthetic construct
  REGION 1..8: note = VH_CDR2_22
IYPGSSSI

SEQ ID NO: 93 - protein, 8 aa, synthetic construct
  REGION 1..8: note = VH_CDR2_23
IYPGDGST

SEQ ID NO: 94 - protein, 10 aa, synthetic construct
  REGION 1..10: note = VH_CDR2_24
IRLKSNNYAT

SEQ ID NO: 95 - protein, 8 aa, synthetic construct
  REGION 1..8: note = VH_CDR2_25
INTNTGES

SEQ ID NO: 96 - protein, 10 aa, synthetic construct
  REGION 1..10: note = VH_CDR2_26
LRLKSNNYAT

SEQ ID NO: 97 - protein, 8 aa, synthetic construct
  REGION 1..8: note = VH_CDR2_27
INPYNDGT

SEQ ID NO: 98 - protein, 8 aa, synthetic construct
  REGION 1..8: note = VH_CDR2_28
IFPGEGIS

SEQ ID NO: 99 - protein, 8 aa, synthetic construct
  REGION 1..8: note = VH_CDR2_29
IFPGDGTT

SEQ ID NO: 100 - protein, 8 aa, synthetic construct
  REGION 1..8: note = VH_CDR2_30
INPGSGAT

SEQ ID NO: 101 - protein, 8 aa, synthetic construct
  REGION 1..8: note = VH_CDR2_31
INPYNGGT

SEQ ID NO: 102 - protein, 8 aa, synthetic construct
  REGION 1..8: note = VH_CDR2_32
FLPGDGSS

SEQ ID NO: 103 - protein, 7 aa, synthetic construct
  REGION 1..7: note = VH_CDR2_33
IWAGGST

SEQ ID NO: 104 - protein, 8 aa, synthetic construct
  REGION 1..8: note = VH_CDR2_34
INTNTGEP

SEQ ID NO: 105 - protein, 7 aa, synthetic construct
  REGION 1..7: note = VH_CDR2_35
ISYDGRN

SEQ ID NO: 106 - protein, 8 aa, synthetic construct
  REGION 1..8: note = VH_CDR2_36
IYPEDDET

SEQ ID NO: 107 - protein, 8 aa, synthetic construct
  REGION 1..8: note = VH_CDR2_37
IYPNNGGT

SEQ ID NO: 108 - protein, 8 aa, synthetic construct
  REGION 1..8: note = VH_CDR2_38
VNTYTGEP

SEQ ID NO: 109 - protein, 8 aa, synthetic construct
  REGION 1..8: note = VH_CDR2_39
IDPYNDAT

SEQ ID NO: 110 - protein, 7 aa, synthetic construct
  REGION 1..7: note = VH_CDR2_40
VAWDDKK

SEQ ID NO: 111 - protein, 7 aa, synthetic construct
  REGION 1..7: note = VH_CDR2_41
ISSGDSP

SEQ ID NO: 112 - protein, 9 aa, synthetic construct
  REGION 1..9: note = VH_CDR3_1
APYDNFFAY

SEQ ID NO: 113 - protein, 9 aa, synthetic construct
  REGION 1..9: note = VH_CDR3_2
STAPGGFDV

SEQ ID NO: 114 - protein, 15 aa, synthetic construct
  REGION 1..15: note = VH_CDR3_3
ARFAYYYGSGGYFDY

SEQ ID NO: 115 - protein, 12 aa, synthetic construct
  REGION 1..12: note = VH_CDR3_4
ARDGNYGDPMDY

SEQ ID NO: 116 - protein, 10 aa, synthetic construct
  REGION 1..10: note = VH_CDR3_5
STPYEYDGAY

SEQ ID NO: 117 - protein, 6 aa, synthetic construct
  REGION 1..6: note = VH_CDR3_6
VRDGGY

SEQ ID NO: 118 - protein, 9 aa, synthetic construct
  REGION 1..9: note = VH_CDR3_7
ARGPYAMDY

SEQ ID NO: 119 - protein, 8 aa, synthetic construct
  REGION 1..8: note = VH_CDR3_8
TSGYGFPY

SEQ ID NO: 120 - protein, 13 aa, synthetic construct
  REGION 1..13: note = VH_CDR3_9
ANYFGCSGWFFDV

SEQ ID NO: 121 - protein, 12 aa, synthetic construct
  REGION 1..12: note = VH_CDR3_10
TRDGNDGDAMDN

SEQ ID NO: 122 - protein, 14 aa, synthetic construct
  REGION 1..14: note = VH_CDR3_11
AKGPYDYDLGWFAY

SEQ ID NO: 123 - protein, 8 aa, synthetic construct
  REGION 1..8: note = VH_CDR3_12
ARHGYYDY

SEQ ID NO: 124 - protein, 12 aa, synthetic construct
  REGION 1..12: note = VH_CDR3_13
TRWGIYYYARDY

SEQ ID NO: 125 - protein, 10 aa, synthetic construct
  REGION 1..10: note = VH_CDR3_14
AVPYEYDGAY

SEQ ID NO: 126 - protein, 10 aa, synthetic construct
  REGION 1..10: note = VH_CDR3_15
ATPYEYDGAY

SEQ ID NO: 127 - protein, 5 aa, synthetic construct
  REGION 1..5: note = VH_CDR3_16
AYLDY

SEQ ID NO: 128 - protein, 14 aa, synthetic construct
  REGION 1..14: note = VH_CDR3_17
AKSPDGYDVAWFGY

SEQ ID NO: 129 - protein, 15 aa, synthetic construct
  REGION 1..15: note = VH_CDR3_18
ARWGGYAGDYYAMDF

SEQ ID NO: 130 - protein, 15 aa, synthetic construct
  REGION 1..15: note = VH_CDR3_19
ARWGGYDGDYYAMDY

SEQ ID NO: 131 - protein, 15 aa, synthetic construct
  REGION 1..15: note = VH_CDR3_20
ARWGGYAGDYYAMDY

SEQ ID NO: 132 - protein, 10 aa, synthetic construct
  REGION 1..10: note = VH_CDR3_21
ASYGNSLFDY

SEQ ID NO: 133 - protein, 7 aa, synthetic construct
  REGION 1..7: note = VH_CDR3_22
VRYTMDY

SEQ ID NO: 134 - protein, 16 aa, synthetic construct
  REGION 1..16: note = VH_CDR3_23
ARNLYDGSYGYYAMDY

SEQ ID NO: 135 - protein, 16 aa, synthetic construct
  REGION 1..16: note = VH_CDR3_24
ARHAHYYGVSPYYFDY

SEQ ID NO: 136 - protein, 12 aa, synthetic construct
  REGION 1..12: note = VH_CDR3_25
AKFGNYVGAMDY

SEQ ID NO: 137 - protein, 13 aa, synthetic construct
  REGION 1..13: note = VH_CDR3_26
ARGEYDYLAWFAY

SEQ ID NO: 138 - protein, 11 aa, synthetic construct
  REGION 1..11: note = VH_CDR3_27
TRFTTVVEMDY

SEQ ID NO: 139 - protein, 5 aa, synthetic construct
  REGION 1..5: note = VH_CDR3_28
ARWGY

SEQ ID NO: 140 - protein, 13 aa, synthetic construct
  REGION 1..13: note = VH_CDR3_29
ARIDYGDYVGFAY

SEQ ID NO: 141 - protein, 11 aa, synthetic construct
  REGION 1..11: note = VH_CDR3_30
AREAASNAMDY

SEQ ID NO: 142 - protein, 13 aa, synthetic construct
  REGION 1..13: note = VH_CDR3_31
TRHYGFPYWYFDV

SEQ ID NO: 143 - protein, 11 aa, synthetic construct
  REGION 1..11: note = VH_CDR3_32
QPGGVTGTLTT

SEQ ID NO: 144 - protein, 7 aa, synthetic construct
  REGION 1..7: note = VH_CDR3_33
ARYPMDY

SEQ ID NO: 145 - protein, 11 aa, synthetic construct
  REGION 1..11: note = VH_CDR3_34
ARLLFYYAMDY

SEQ ID NO: 146 - protein, 11 aa, synthetic construct
  REGION 1..11: note = VH_CDR3_35
AREATAGAMDY

SEQ ID NO: 147 - protein, 11 aa, synthetic construct
  REGION 1..11: note = VH_CDR3_36
AREGAGSWFAY

SEQ ID NO: 148 - protein, 7 aa, synthetic construct
  REGION 1..7: note = VH_CDR3_37
TYNDLGY

SEQ ID NO: 149 - protein, 16 aa, synthetic construct
  REGION 1..16: note = VH_CDR3_38
ARKDDYYGSSPYALDY

SEQ ID NO: 150 - protein, 9 aa, synthetic construct
  REGION 1..9: note = VH_CDR3_39
VRDDYDSDY

SEQ ID NO: 151 - protein, 14 aa, synthetic construct
  REGION 1..14: note = VH_CDR3_40
ARIYYYGRGYAMDY

SEQ ID NO: 152 - protein, 15 aa, synthetic construct
  REGION 1..15: note = VH_CDR3_41
ARGDYYYGTRGPMDY

SEQ ID NO: 153 - protein, 8 aa, synthetic construct
  REGION 1..8: note = VH_CDR3_42
ARWGAMDY

SEQ ID NO: 154 - protein, 15 aa, synthetic construct
  REGION 1..15: note = VH_CDR3_43
ARDRASLLRPGAMDY

SEQ ID NO: 155 - protein, 11 aa, synthetic construct
  REGION 1..11: note = VH_CDR3_44
ARLDYDYDEDY

SEQ ID NO: 156 - protein, 14 aa, synthetic construct
  REGION 1..14: note = VH_CDR3_45
ASPPSGYDYDVFAS

SEQ ID NO: 157 - protein, 14 aa, synthetic construct
  REGION 1..14: note = VH_CDR3_46
ASPPSGYDYDVFAY

SEQ ID NO: 158 - protein, 14 aa, synthetic construct
  REGION 1..14: note = VH_CDR3_47
AKPPYDYDGAWFAY

SEQ ID NO: 159 - protein, 7 aa, synthetic construct
  REGION 1..7: note = VH_CDR3_48
ATGRPDY

SEQ ID NO: 160 - protein, 7 aa, synthetic construct
  REGION 1..7: note = VH_CDR3_49
AKGRPDY

SEQ ID NO: 161 - protein, 11 aa, synthetic construct
  REGION 1..11: note = VH_CDR3_50
AGYDFLWYFDV

SEQ ID NO: 162 - protein, 12 aa, synthetic construct
  REGION 1..12: note = VH_CDR3_51
ARSGGYYVWFAY

SEQ ID NO: 163 - protein, 14 aa, synthetic construct
  REGION 1..14: note = VH_CDR3_52
ARSYYDGSYDAMDY

SEQ ID NO: 164 - protein, 7 aa, synthetic construct
  REGION 1..7: note = VH_CDR3_53
ARGWFAY

SEQ ID NO: 165 - protein, 14 aa, synthetic construct
  REGION 1..14: note = VH_CDR3_54
AKPPHDYDQAWFAY

SEQ ID NO: 166 - protein, 9 aa, synthetic construct
  REGION 1..9: note = VH_CDR3_55
VNSNYESGY

SEQ ID NO: 167 - protein, 9 aa, synthetic construct
  REGION 1..9: note = VH_CDR3_56
ANSNYASGS

SEQ ID NO: 168 - protein, 13 aa, synthetic construct
  REGION 1..13: note = VH_CDR3_57
ARWGRYEYYAMDY

SEQ ID NO: 169 - protein, 9 aa, synthetic construct
  REGION 1..9: note = VH_CDR3_58
TMTGGPINY

SEQ ID NO: 170 - protein, 16 aa, synthetic construct
  REGION 1..16: note = VL-CDR1_1
RSSKSLLYKDGKTYLN

SEQ ID NO: 171 - protein, 11 aa, synthetic construct
  REGION 1..11: note = VL-CDR1_2
KSLLHSDGITY

SEQ ID NO: 172 - protein, 6 aa, synthetic construct
  REGION 1..6: note = VL-CDR1_3
QGINSN

SEQ ID NO: 173 - protein, 11 aa, synthetic construct
  REGION 1..11: note = VL-CDR1_4
QSLLYTNGKTY

SEQ ID NO: 174 - protein, 11 aa, synthetic construct
  REGION 1..11: note = VL-CDR1_5
QSLFDSDGKTY

SEQ ID NO: 175 - protein, 11 aa, synthetic construct
  REGION 1..11: note = VL-CDR1_6
QSIVHNNGNTY

SEQ ID NO: 176 - protein, 6 aa, synthetic construct
  REGION 1..6: note = VL-CDR1_7
QGINNY

SEQ ID NO: 177 - protein, 6 aa, synthetic construct
  REGION 1..6: note = VL-CDR1_8
QNIYIW

SEQ ID NO: 178 - protein, 6 aa, synthetic construct
  REGION 1..6: note = VL-CDR1_9
QDISNY

SEQ ID NO: 179 - protein, 11 aa, synthetic construct
  REGION 1..11: note = VL-CDR1_10
QSIVHSNGNTY

SEQ ID NO: 180 - protein, 11 aa, synthetic construct
  REGION 1..11: note = VL-CDR1_11
QSLLYTDGKTY

SEQ ID NO: 181 - protein, 6 aa, synthetic construct
  REGION 1..6: note = VL-CDR1_12
QSVSND

SEQ ID NO: 182 - protein, 6 aa, synthetic construct
  REGION 1..6: note = VL-CDR1_13
QGISNY

SEQ ID NO: 183 - protein, 6 aa, synthetic construct
  REGION 1..6: note = VL-CDR1_14
QDVSTA

SEQ ID NO: 184 - protein, 6 aa, synthetic construct
  REGION 1..6: note = VL-CDR1_15
QNVGTN

SEQ ID NO: 185 - protein, 11 aa, synthetic construct
  REGION 1..11: note = VL-CDR1_16
QSLFHSDGKTY

SEQ ID NO: 186 - protein, 6 aa, synthetic construct
  REGION 1..6: note = VL-CDR1_17
QNINIW

SEQ ID NO: 187 - protein, 11 aa, synthetic construct
  REGION 1..11: note = VL-CDR1_18
QSLLHSDGKTY

SEQ ID NO: 188 - protein, 6 aa, synthetic construct
  REGION 1..6: note = VL-CDR1_19
QDVRTA

SEQ ID NO: 189 - protein, 12 aa, synthetic construct
  REGION 1..12: note = VL-CDR1_20
QSVLYSSNQKNY

SEQ ID NO: 190 - protein, 12 aa, synthetic construct
  REGION 1..12: note = VL-CDR1_21
QSVLYSSSQKNY

SEQ ID NO: 191 - protein, 11 aa, synthetic construct
  REGION 1..11: note = VL-CDR1_22
QSLVHNSGNTY

SEQ ID NO: 192 - protein, 9 aa, synthetic construct
  REGION 1..9: note = VL-CDR1_23
TGAVTTSNY

SEQ ID NO: 193 - protein, 11 aa, synthetic construct
  REGION 1..11: note = VL-CDR1_24
KSLLHTNGITF

SEQ ID NO: 194 - protein, 12 aa, synthetic construct
  REGION 1..12: note = VL-CDR1_25
QSLLNSSNQKNY

SEQ ID NO: 195 - protein, 6 aa, synthetic construct
  REGION 1..6: note = VL-CDR1_26
QNINVW

SEQ ID NO: 196 - protein, 6 aa, synthetic construct
  REGION 1..6: note = VL-CDR1_27
IDIDDD

SEQ ID NO: 197 - protein, 11 aa, synthetic construct
  REGION 1..11: note = VL-CDR1_28
QDIVHSSGNTY

SEQ ID NO: 198 - protein, 11 aa, synthetic construct
  REGION 1..11: note = VL-CDR1_29
KSLLYSNGITY

SEQ ID NO: 199 - protein, 10 aa, synthetic construct
  REGION 1..10: note = VL-CDR1_30
KSVSTSGYSY

SEQ ID NO: 200 - protein, 10 aa, synthetic construct
  REGION 1..10: note = VL-CDR1_31
ESVDSYGNSF

SEQ ID NO: 201 - protein, 11 aa, synthetic construct
  REGION 1..11: note = VL-CDR1_32
QSLLYSNGKTY

SEQ ID NO: 202 - protein, 6 aa, synthetic construct
  REGION 1..6: note = VL-CDR1_33
QGISSN

SEQ ID NO: 203 - protein, 10 aa, synthetic construct
  REGION 1..10: note = VL-CDR1_34
KSVSTSGYSC

SEQ ID NO: 204 - protein, 11 aa, synthetic construct
  REGION 1..11: note = VL-CDR1_35
QSLLYSDGKTY

SEQ ID NO: 205 - protein, 10 aa, synthetic construct
  REGION 1..10: note = VL-CDR1_36
ESVENHVNSF

SEQ ID NO: 206 - protein, 5 aa, synthetic construct
  REGION 1..5: note = VL-CDR1_37
SSVTY

SEQ ID NO: 207 - protein, 10 aa, synthetic construct
  REGION 1..10: note = VL-CDR1_38
ESLDNSGISF

SEQ ID NO: 208 - protein, 6 aa, synthetic construct
  REGION 1..6: note = VL-CDR1_39
QDVSTT

SEQ ID NO: 209 - protein, 6 aa, synthetic construct
  REGION 1..6: note = VL-CDR1_40
QNVGIN

SEQ ID NO: 210 - protein, 11 aa, synthetic construct
  REGION 1..11: note = VL-CDR1_41
QSLLDSDGKTY

SEQ ID NO: 211 - protein, 6 aa, synthetic construct
  REGION 1..6: note = VL-CDR1_42
GNIHNY

SEQ ID NO: 212 - protein, 6 aa, synthetic construct
  REGION 1..6: note = VL-CDR1_43
QSVSSD

SEQ ID NO: 213 - protein, 11 aa, synthetic construct
  REGION 1..11: note = VL-CDR1_44
QSLLYINGKTY

SEQ ID NO: 214 - protein, 11 aa, synthetic construct
  REGION 1..11: note = VL-CDR1_45
RSLLHSNGYTY

SEQ ID NO: 215 - protein, 11 aa, synthetic construct
  REGION 1..11: note = VL-CDR1_46
RSLLDSDGKTY

SEQ ID NO: 216 - protein, 6 aa, synthetic construct
  REGION 1..6: note = VL-CDR1_47
QDVSSV

SEQ ID NO: 217 - protein, 6 aa, synthetic construct
  REGION 1..6: note = VL-CDR1_48
QIINNN

SEQ ID NO: 218 - protein, 10 aa, synthetic construct
  REGION 1..10: note = VL-CDR1_49
KSVTTSAYSY

SEQ ID NO: 219 - protein, 11 aa, synthetic construct
  REGION 1..11: note = VL-CDR1_50
QSLLDRDGKTY

SEQ ID NO: 220 - protein, 6 aa, synthetic construct
  REGION 1..6: note = VL-CDR1_51
QSVSNE

SEQ ID NO: 221 - protein, 7 aa, synthetic construct
  REGION 1..7: note = VL-CDR2_1
LMSTHAS

SEQ ID NO: 222-247 - skipped (26 entries)

SEQ ID NO: 248 - protein, 9 aa, synthetic construct
  REGION 1..9: note = VL-CDR3_1
QQLVDYPLT

SEQ ID NO: 249 - protein, 9 aa, synthetic construct
  REGION 1..9: note = VL-CDR3_2
AQMLEFPLT

SEQ ID NO: 250 - protein, 9 aa, synthetic construct
  REGION 1..9: note = VL-CDR3_3
VQYAQFPPT

SEQ ID NO: 251 - protein, 9 aa, synthetic construct
  REGION 1..9: note = VL-CDR3_4
LQSTHFPLT

SEQ ID NO: 252 - protein, 9 aa, synthetic construct
  REGION 1..9: note = VL-CDR3_5
WQGTHFPLT

SEQ ID NO: 253 - protein, 9 aa, synthetic construct
  REGION 1..9: note = VL-CDR3_6
FQGSHVPLT

SEQ ID NO: 254 - protein, 9 aa, synthetic construct
  REGION 1..9: note = VL-CDR3_7
QQYSQVPYT

SEQ ID NO: 255 - protein, 9 aa, synthetic construct
  REGION 1..9: note = VL-CDR3_8
LQGQSYPLT

SEQ ID NO: 256 - protein, 9 aa, synthetic construct
  REGION 1..9: note = VL-CDR3_9
QQYSKLPYT

SEQ ID NO: 257 - protein, 9 aa, synthetic construct
  REGION 1..9: note = VL-CDR3_10
AQMIEFPLT

SEQ ID NO: 258 - protein, 9 aa, synthetic construct
  REGION 1..9: note = VL-CDR3_11
QQDYTSPYT

SEQ ID NO: 259 - protein, 9 aa, synthetic construct
  REGION 1..9: note = VL-CDR3_12
QQYSELPYT

SEQ ID NO: 260 - protein, 9 aa, synthetic construct
  REGION 1..9: note = VL-CDR3_13
QQHYTTPLT

SEQ ID NO: 261 - protein, 9 aa, synthetic construct
  REGION 1..9: note = VL-CDR3_14
EQYSNFPLT

SEQ ID NO: 262 - protein, 9 aa, synthetic construct
  REGION 1..9: note = VL-CDR3_15
QQYSSYPWT

SEQ ID NO: 263 - protein, 8 aa, synthetic construct
  REGION 1..8: note = VL-CDR3_16
HQYLSSLT

SEQ ID NO: 264 - protein, 9 aa, synthetic construct
  REGION 1..9: note = VL-CDR3_17
SQSTHVPPT

SEQ ID NO: 265 - protein, 9 aa, synthetic construct
  REGION 1..9: note = VL-CDR3_18
ALWYSNHWV

SEQ ID NO: 266 - protein, 9 aa, synthetic construct
  REGION 1..9: note = VL-CDR3_19
AQNLELPWT

SEQ ID NO: 267 - protein, 9 aa, synthetic construct
  REGION 1..9: note = VL-CDR3_20
QQHYSTPYT

SEQ ID NO: 268 - protein, 9 aa, synthetic construct
  REGION 1..9: note = VL-CDR3_21
QQGQSYPYT

SEQ ID NO: 269 - protein, 9 aa, synthetic construct
  REGION 1..9: note = VL-CDR3_22
LQSDNKPLT

SEQ ID NO: 270 - protein, 9 aa, synthetic construct
  REGION 1..9: note = VL-CDR3_23
ALWYSNHLV

SEQ ID NO: 271 - protein, 9 aa, synthetic construct
  REGION 1..9: note = VL-CDR3_24
FQGSHVPPT

SEQ ID NO: 272 - protein, 9 aa, synthetic construct
  REGION 1..9: note = VL-CDR3_25
QHSRELPLT

SEQ ID NO: 273 - protein, 9 aa, synthetic construct
  REGION 1..9: note = VL-CDR3_26
QQNNEDPWT

SEQ ID NO: 274 - protein, 9 aa, synthetic construct
  REGION 1..9: note = VL-CDR3_27
VQGTHFPQT

SEQ ID NO: 275 - protein, 9 aa, synthetic construct
  REGION 1..9: note = VL-CDR3_28
VQYDQFPWT

SEQ ID NO: 276 - protein, 9 aa, synthetic construct
  REGION 1..9: note = VL-CDR3_29
HHSTELPYT

SEQ ID NO: 277 - protein, 8 aa, synthetic construct
  REGION 1..8: note = VL-CDR3_30
VQGTHLPT

SEQ ID NO: 278 - protein, 9 aa, synthetic construct
  REGION 1..9: note = VL-CDR3_31
QQNNEVPYT

SEQ ID NO: 279 - protein, 9 aa, synthetic construct
  REGION 1..9: note = VL-CDR3_32
QQWSSNPLT

SEQ ID NO: 280 - protein, 9 aa, synthetic construct
  REGION 1..9: note = VL-CDR3_33
QHSKEVPWT

SEQ ID NO: 281 - protein, 9 aa, synthetic construct
  REGION 1..9: note = VL-CDR3_34
QQHYSPPFT

SEQ ID NO: 282 - protein, 9 aa, synthetic construct
  REGION 1..9: note = VL-CDR3_35
QQYNSYPYT

SEQ ID NO: 283 - protein, 9 aa, synthetic construct
  REGION 1..9: note = VL-CDR3_36
WQGTHFPFT

SEQ ID NO: 284 - protein, 9 aa, synthetic construct
  REGION 1..9: note = VL-CDR3_37
QHFWSIFPT

SEQ ID NO: 285 - protein, 9 aa, synthetic construct
  REGION 1..9: note = VL-CDR3_38
QHFWSLFPT

SEQ ID NO: 286 - protein, 9 aa, synthetic construct
  REGION 1..9: note = VL-CDR3_39
QHNYISPFT

SEQ ID NO: 287 - protein, 9 aa, synthetic construct
  REGION 1..9: note = VL-CDR3_40
QQHYNTPYT

SEQ ID NO: 288 - protein, 9 aa, synthetic construct
  REGION 1..9: note = VL-CDR3_41
LQSTHFPQT

SEQ ID NO: 289 - protein, 9 aa, synthetic construct
  REGION 1..9: note = VL-CDR3_42
MQHLEYPYT

SEQ ID NO: 290 - protein, 9 aa, synthetic construct
  REGION 1..9: note = VL-CDR3_43
QQYSKLPRT

SEQ ID NO: 291 - protein, 9 aa, synthetic construct
  REGION 1..9: note = VL-CDR3_44
WQGTHFPQT

SEQ ID NO: 292 - protein, 9 aa, synthetic construct
  REGION 1..9: note = VL-CDR3_45
QQGQSSPFT

SEQ ID NO: 293 - protein, 9 aa, synthetic construct
  REGION 1..9: note = VL-CDR3_46
QQTNSWPLT

SEQ ID NO: 294 - protein, 9 aa, synthetic construct
  REGION 1..9: note = VL-CDR3_47
QHNRELPPT

SEQ ID NO: 295 - protein, 8 aa, synthetic construct
  REGION 1..8: note = VL-CDR3_48
WQGTHFPT

SEQ ID NO: 296 - protein, 9 aa, synthetic construct
  REGION 1..9: note = VL-CDR3_49
QQHYSSPWT

SEQ ID NO: 297 - protein, 116 aa, synthetic construct
  REGION 1..116: note = VH-1 Peptide Sequence
QVQLVQSGSELKKPGASVKVSCKASGYTFTNYGMNWVRQAPGQGLKWMGWINTNTGEPTYVEEFTGRFVFSLETSVSTAYLQISSLKAEDTAVYFCAPYDNFFAYWGQGTTVTVSS

SEQ ID NO: 298 - protein, 116 aa, synthetic construct
  REGION 1..116: note = VH-2 Peptide Sequence
QVQLVQSGAEVKKPGASVKVSCKASGYSFTNYYMHWVRQAPGQRLEWMGWIYPGSGNTNYNEKFQGRVTITADTSASTAYMELSSLRSEDTAVYYCSTAPGGFDVWGQGTTVTVSS

SEQ ID NO: 299 - protein, 122 aa, synthetic construct
  REGION 1..122: note = VH-3 Peptide Sequence
QVQLKQSGAELVRPGASVKLSCKASGYTFTDYYINWVKQRPGQGLEWIARIYPGTGNTDYNEKFKGRATLTAEKSSSTAYMQLSSLTSEDSAVYFCARFAYYYGSGGYFDYWGHGTTLTVSS

SEQ ID NO: 300 - protein, 119 aa, synthetic construct
  REGION 1..119: note = VH-4 Peptide Sequence
QIQLVQSGPELKKPGETVKISCKTSGYKFKTYVMSWVKQAPGKALKWMGWINTYSGVPTYADDFKGRFAFSLETSASTAYLEIINLKNEDTATYFCARDGNYGDPMDYWGQGTSVTVSS

SEQ ID NO: 301 - protein, 117 aa, synthetic construct
  REGION 1..117: note = VH-5 Peptide Sequence
QIQLVQSGPELKKPGETVKISCKASGYTFTTYGMGWVKQAPGKDLKWMGWINTYSGVPTYADDFKGRFAFSLETSASTAYLQISNLKNEDTATYFCSTPYEYDGAYWGQGTLVTVSA

SEQ ID NO: 302 - protein, 113 aa, synthetic construct
  REGION 1..113: note = VH-6 Peptide Sequence
EVQLVESGGGLVKPGGSLKLSCAASGFAFSSYAMSWVRQTPEKRLEWVATISDGGVYTYYTDHVKGRFTISRDNAEDNLYLQMSHLKSEDTAMYYCVRDGGYWGQGTTLTVSS

SEQ ID NO: 303 - protein, 116 aa, synthetic construct
  REGION 1..116: note = VH-7 Peptide Sequence
QIQLVQSGPELKKPGETVKISCKASGYTFTTYAMSWVKQAPGKGLKWMGWINTYSGVPTYADDLKGRFAFSLETSASTAYLQINNLKNEDTATYFCARGPYAMDYWGQGTSVTVSS

SEQ ID NO: 304 - protein, 115 aa, synthetic construct
  REGION 1..115: note = VH-8 Peptide Sequence
EVQLQQSGPELVKPGASVKISCKASGYTFTDFYINWVKQSHGKSLEWIGDINPKNGGINYNPKFKIKATLTVDKSSSTSYMDLRGLTSEDSAVYYCTSGYGFPYWGQGTLVTVSA

SEQ ID NO: 305 - protein, 116 aa, synthetic construct
  REGION 1..116: note = VH-9 Peptide Sequence
QIQLVQSGPELKKPGESVKISCKASGYAFTTYGMSWVQQAPGKGLKWMGWVNTYSGVPTCADDFKGRFAFSLETSASTAYLQINNLRNEDTATYFCARGPYAMDYWGQGTSVTVSS

SEQ ID NO: 306 - protein, 120 aa, synthetic construct
  REGION 1..120: note = VH-10 Peptide Sequence
QVQLQQSGPELVKPGASVKISCKASGYTFTDYYINWVKQRPGQGLEWIGWIYPGSNDTKYNEKFKGKATLTVDTSSSTAYMQLGSLTSEDSAVYFCANYFGCSGWFFDVWGTGTTVTVSS

SEQ ID NO: 307 - protein, 113 aa, synthetic construct
  REGION 1..113: note = VH-11 Peptide Sequence
EVQLVESGGGLVKPGGSLKLSCAASGFTFSSYAMSWVRQTPEKRLEWVATISDGGIYTYYPDNVKGRFTISRDNAKNNLFLQMSHLKSEDTAMYYCVRDGGYWGQGTTLTVSS

SEQ ID NO: 308 - protein, 116 aa, synthetic construct
  REGION 1..116: note = VH-12 Peptide Sequence
QIQLVQSGPELKKPGETVKISCKASGYTFTNYGMNWVKQAPGKGLKWMGWINTNTGEPTYVEEFKGRFAFSLETSASTAYLQINNLKNEDTATYFCAPYDNFFAYWGQGTLVTVSA

SEQ ID NO: 309 - protein, 116 aa, synthetic construct
  REGION 1..116: note = VH-13 Peptide Sequence
QVQLQQSGPELVKPGASVKISCKASGYSFTNYYIHWVKQRPGQGLEWIGWIYPGSGNTNYNEKFKGKATLTADTSSSTTNMQLSSLTSEDSAVYYCSTAPGGFDVWGSGTTVTVSS

SEQ ID NO: 310 - protein, 116 aa, synthetic construct
  REGION 1..116: note = VH-14 Peptide Sequence
QVQLVQSGAEVKKPGASVKVSCKASGYSFTNYYMHWVRQAPGQGLEWMGWIYPGSGNTNYNEKFQGRVTMTADTSISTAYMELSRLRSDDTAVYYCSTAPGGFDVWGQGTTVTVSS

SEQ ID NO: 311 - protein, 116 aa, synthetic construct
  REGION 1..116: note = VH-15 Peptide Sequence
QVQLVQSGAEVKKPGASVKVSCKASGYSFTNYYIHWVRQAPGQRLEWMGWIYPGSGNTNYNEKFQGRVTLTADTSASTTYMELSSLRSEDTAVYYCSTAPGGFDVWGQGTTVTVSS

SEQ ID NO: 312 - protein, 119 aa, synthetic construct
  REGION 1..119: note = VH-16 Peptide Sequence
QIQLVQSGPDLKKPGETVKISCKASGYTFTTYVMSWVKQAPGKDLKWMGWINTHSGVPTYADDFKGRFDFSLETSANTAFLQINNLKNEDTATYFCTRDGNDGDAMDNWGQGTSVTVSS

SEQ ID NO: 313 - protein, 120 aa, synthetic construct
  REGION 1..120: note = VH-17 Peptide Sequence
QVQLKQSGPGLVQPSQSLSITCTVSGFSLTSYGVHWVRQPPGKGLEWLGVIWSGGSTDYNAAFISRLSISKDNSKSQVFFKMNSLQADDTAIYYCAKGPYDYDLGWFAYWGQGTLVTVSA

SEQ ID NO: 314 - protein, 116 aa, synthetic construct
  REGION 1..116: note = VH-18 Peptide Sequence
QIQLVQSGPELKKPGETVKISCKASGYTFTTYGMSWVKQAPGKGLKWMAWINTYSGVPTYADDFKGRFAFSLETSASTAYLQINNLTNEDTATYFCARGPYAMDYWGQGTSVTVSS

SEQ ID NO: 315 - protein, 115 aa, synthetic construct
  REGION 1..115: note = VH-19 Peptide Sequence
QVQLQQPGAELVGPGSSVKLSCKASGYTFTNYWIHWVKQRPLQGLEWIGNIDPSDSETHYNQKFKDKATLTVDKSSSTAYMQLSSLTSEDSAVYYCARHGYYDYWGQGTTLTVSS

SEQ ID NO: 316 - protein, 119 aa, synthetic construct
  REGION 1..119: note = VH-20 Peptide Sequence
QVQLQQPGAELVKPGASVKLSCKASGYTFTSYWMHWVKQRPGQGLEWIGMIHPNSGSTDYNEKFKNKATLNVDKSSSTAYIQLSSLTSEDSAVYYCTRWGIYYYARDYWGQGTTLTVSS

SEQ ID NO: 317 - protein, 117 aa, synthetic construct
  REGION 1..117: note = VH-21 Peptide Sequence
QIQLVQSGPELKKPGETVKISCKASGYTFTTYGMSWVKQAPGKGLKWMGWINTYSGVPTYADDFKGRFAFSLETSASTAYLQINNLKNEDTATYFCAVPYEYDGAYWGQGTLVTVSA

SEQ ID NO: 318 - protein, 115 aa, synthetic construct
  REGION 1..115: note = VH-22 Peptide Sequence
EVQLQQSGPELVKPGASVKISCKASGYTFTDYYMNWVKQSHGKSLEWIGDINPNNGGTNYNQKFKGKATLTVDKSSSTAYMELRSLTSEDSAVYYCTSGYGFPYWGQGTLVTVSA

SEQ ID NO: 319 - protein, 117 aa, synthetic construct
  REGION 1..117: note = VH-23 Peptide Sequence
QIQLVQSGPELKKPGETVKISCKASGYTFTTYGMGWVKQAPGKGLKWMGWINTYSGVPTYADDFKGRFAFSLETSTSTAYLQINNLKNEDMATYFCATPYEYDGAYWGQGTLVTVSA

SEQ ID NO: 320 - protein, 112 aa, synthetic construct
  REGION 1..112: note = VH-24 Peptide Sequence
QVQLQQSGPELVKPGDSVKISCKAAGYTFSDYYINWVKQRPGQGLEWIGWIYPVSVNTKYNEKFKGKATLTVDTSSSTAYMQLSSLTSEDSGVYFCAYLDYWGQGTLVTVSA

SEQ ID NO: 321 - protein, 120 aa, synthetic construct
  REGION 1..120: note = VH-25 Peptide Sequence
QVQLKQSGPGLVQPSQSLSITCTVSGFSLTSYGVHWVRQAPGKGLEWLGVIWSGGSTDYNAAFMSRLSISKDNSKSQVFFKMNSLQADDTAIYYCAKSPDGYDVAWFGYWGQGTLVTVSA

SEQ ID NO: 322 - protein, 122 aa, synthetic construct
  REGION 1..122: note = VH-26 Peptide Sequence
QIQLVQSGPELKKPGETVKISCKASGYTFTNYGMNWVKQAPGKGLKWMGWINTYTGEPSYADDFKGRFAFSLETSASTAYLQINNLKNEDMATYFCARWGGYAGDYYAMDFWGQGTSVTVSS

SEQ ID NO: 323 - protein, 122 aa, synthetic construct
  REGION 1..122: note = VH-27 Peptide Sequence
QIQLVQSGPELKKPGETVKISCKASGYTFTNYGMNWVKQAPGKGLKWMGWINTYTGEPSYADDFKGRFAFSLETSASTAYLQINNLKNEDMATYFCARWGGYDGDYYAMDYWGQGTSVTVSS

SEQ ID NO: 324 - protein, 122 aa, synthetic construct
  REGION 1..122: note = VH-28 Peptide Sequence
QIQLVQSGPELKKPGETVKISCKASGYTFTNFGMNWVKQAPGKGLKWMGWINTYTGEPSYADDFKGRFAFSLETSASTAYLQINNLKNEDIATYFCARWGGYAGDYYAMDYWGQGTSVTVSS

SEQ ID NO: 325 - protein, 116 aa, synthetic construct
  REGION 1..116: note = VH-29 Peptide Sequence
EVQLLESGGGLVKPGGSLKLSCAASGFTFSSYAMSWVRQTPEKRLEWVASISSGGDTYYPDSVKGRFTISRDNARNILYLQMSSLRSEDTAMYYCASYGNSLFDYWGQGTTLTVSS

SEQ ID NO: 326 - protein, 114 aa, synthetic construct
  REGION 1..114: note = VH-30 Peptide Sequence
QIQLVQSGPELKKPGETVKISCKASGYTFTNYGMNWVKQAPGKGLKWMGWINTYTGEPTYAGDLKGRFAFSLETSASTAYLQINNLKNEDTATYFCVRYTMDYWGQGTSVTVSS

SEQ ID NO: 327 - protein, 124 aa, synthetic construct
  REGION 1..124: note = VH-31 Peptide Sequence
QVTLKESGPGILQPSQTLSLTCSFSGFSLSTSGMGVGWIRQPSGKGLEWLAHIWWDDDKYYNTALKSGLTISKDASKNQVFLKIASMDTADTATYYCARNLYDGSYGYYAMDYWGQGTSVTVSS

SEQ ID NO: 328 - protein, 122 aa, synthetic construct
  REGION 1..122: note = VH-32 Peptide Sequence
QIQLVQSGPELKKPGETVKISCKASGYTFTNYGMNWVKQAPGKGLKWMGWINTYTGEPAYADDFKGRFAFSLETSASTAYLQINNLKNEDMATYFCARWGGYDGDYYAMDYWGQGTSVTVSS

SEQ ID NO: 329 - protein, 123 aa, synthetic construct
  REGION 1..123: note = VH-33 Peptide Sequence
EVQLVESGGDLVKPGGSLKLSCAASGFTFSNYGLSWIRQTPDKRLEWVATISSGGSYTYYPDSVKGRFTISRDSAKNTLYLQMSSLKSEDTAMYYCARHAHYYGVSPYYFDYWGQGTCLTVSS

SEQ ID NO: 330 - protein, 119 aa, synthetic construct
  REGION 1..119: note = VH-34 Peptide Sequence
QIQLVQSGPEVKKPGETVKISCKASGYIFTNYGMNWVKQAPGKGLKWMGWINTYTGEPTYTDDFKGRFAFSLETSASTAYLQINNLKNEDTATYFCAKFGNYVGAMDYWGQGTSVTVSS

SEQ ID NO: 331 - protein, 120 aa, synthetic construct
  REGION 1..120: note = VH-35 Peptide Sequence
EVQLQQSGPELVKPGASVKISCKASGNTFTDHNMHWVKQSHGKSLEWIGYIYPYNGGTGYNQKFKSKATLTVDNSSSTVYMELRSLTSEDSAVYYCARGEYDYLAWFAYWGQGTLVTVSA

SEQ ID NO: 332 - protein, 119 aa, synthetic construct
  REGION 1..119: note = VH-36 Peptide Sequence
QIQLVQSGPELKKPGETVKISCKASGYTFTNYGMNWVKQAPGKGLKWMGWINTYTGEPTYVDDFKGRFAFSLETSASTAYLRINNLKNEDTATYFCAKFGNYVGAMDYWGQGTSVTVSS

SEQ ID NO: 333 - protein, 117 aa, synthetic construct
  REGION 1..117: note = VH-37 Peptide Sequence
EVQLVETGGGLVKPGGSLKLSCAASGFTFSSYAMSWVRQTPEKRLEWVASISSGGSTYYPDSVKGRFTISRDNARNILYLQMSSLRSEDTAMYYCTRFTTVVEMDYWGQGTSVTVSS

SEQ ID NO: 334 - protein, 112 aa, synthetic construct
  REGION 1..112: note = VH-38 Peptide Sequence
QVQLQQTGAELVKPGASVKLSCKASGYTFTSYWINWVKQRPGQGLEWIGNIYPGSSSIYYSEKFKSKATLTVDTSSSTAYMQLSSLTSDDSAVYYCARWGYWGQGTTLTVSS

SEQ ID NO: 335 - protein, 121 aa, synthetic construct
  REGION 1..121: note = VH-39 Peptide Sequence
QVTLKESGPGILQPSQTLSLTCSFSGFSLSTFGMGVGWIRQPSGKGLEWLAHIWWDDDKHYNPALKSRLTISKDTSKNQVFLRIANVDTADNATYYCARIDYGDYVGFAYWGQGTLVTVSA

SEQ ID NO: 336 - protein, 118 aa, synthetic construct
  REGION 1..118: note = VH-40 Peptide Sequence
QVQLQQSGPELVRPGALVKISCKASGYTFTSYDINWVKQRPGQGLEWIGWIYPGDGSTKYNEKFKGKATLTADKSSSTAYMQLSSLTSENSAVYFCAREAASNAMDYWGQGTSVTVSS

SEQ ID NO: 337 - protein, 122 aa, synthetic construct
  REGION 1..122: note = VH-41 Peptide Sequence
EVKLEESGGGLVQPGGSMKLSCVASGFTFSNYWMNWVRQSPEKGLEWVAEIRLKSNNYATHYAESVKGRFTISRDDSKSSVYLQMNNLRAEDTGIYYCTRHYGFPYWYFDVWGAGTTVTVSS

SEQ ID NO: 338 - protein, 118 aa, synthetic construct
  REGION 1..118: note = VH-42 Peptide Sequence
QIQLVQSGPELKKPGETVKISCKASGYTFTNYGMNWVKQAPGKGLKWMGWINTNTGEPTYAEEFKGRFAFSLETSASTAYLQINNLKNEDTATYFCATGGGNWDFDYWGQGTTLTVSS

SEQ ID NO: 339 - protein, 114 aa, synthetic construct
  REGION 1..114: note = VH-43 Peptide Sequence
QIQLVQSGPELTKPGETVKISCKASGYTFTDYGMNWVRQAPGETLKWMGWINTYTGEPTYADDFKGRFAFSLESSASTAYLQINNLKNEDVATYFCARYPMDYWGQGTSVTVSS

SEQ ID NO: 340 - protein, 122 aa, synthetic construct
  REGION 1..122: note = VH-44 Peptide Sequence
EVKLEESGGGLVQPGGSMKLSCVASGFTFSNYWMNWVRQSPEKGLEWVAELRLKSNNYATHYAESVKGRFTISRDDSKSSVYLQMNNLRAEDTGIYYCTRHYGFPYWYFDVWGAGTTVTVSS

SEQ ID NO: 341 - protein, 118 aa, synthetic construct
  REGION 1..118: note = VH-45 Peptide Sequence
EVQLQQSGPELVKPGASVKMSCKASGYTFTSYVMHWVKQKPGQGLEWIGYINPYNDGTKYNEKFKGKATLTSDKSSSTAYMELSSLTSEDSAVYYCARLLFYYAMDYWGQGTSVTVSS

SEQ ID NO: 342 - protein, 118 aa, synthetic construct
  REGION 1..118: note = VH-46 Peptide Sequence
QVQLQQSGPELVRPGALVKISCKASGYTFTSYDINWVKQRPGQGLEWIGWIYPGDGSTKYNEKFKGKATLTADKSSSTVYMQLSSLTSENSAVYFCAREAASNAMDYWGQGTSVTVSS

SEQ ID NO: 343 - protein, 118 aa, synthetic construct
  REGION 1..118: note = VH-47 Peptide Sequence
QVQLQQSGPELVKPGALVKISCKASGYTFTSYDINWVKQRPGQGLEWIGWIYPGDGSTKYNEKFKGKAALTADKSSSTAYMQLSSLTSENSAVYFCAREAASNAMDYWGQGTSVTVSS

SEQ ID NO: 344 - protein, 118 aa, synthetic construct
  REGION 1..118: note = VH-48 Peptide Sequence
EVQLQQSGPELVKPGASVKMSCKASGYSFTNYIMHWVKQKPGQGLEWIGYINPYNDGTKYNEKFKGKATLTSDKSSSTAYMELSSLTSEDSAVYYCARLLFYYAMDYWGQGTSVTVSS

SEQ ID NO: 345 - protein, 118 aa, synthetic construct
  REGION 1..118: note = VH-49 Peptide Sequence
QVQLQQSGAELVKPGASVKLSCKASGYTFRSYDINWVRQRPEQGLEWIGWIFPGEGISKYNEKFKGKATLTTDKLSSTAYMQLSSLTSEDSAVYFCAREATAGAMDYWGQGTSVTVSS

SEQ ID NO: 346 - protein, 122 aa, synthetic construct
  REGION 1..122: note = VH-50 Peptide Sequence
EVKLLESGGGLVQPGGSMKLSCVASGFTFSNFWMNWVRQSPEKGLEWVAEIRLKSNNYATHYAESVKGRFTISRDDSKSSVYLQMNNLRAEDTGIYYCTRHYGFPYWYFDVWGAGTTVTVSS

SEQ ID NO: 347 - protein, 118 aa, synthetic construct
  REGION 1..118: note = VH-51 Peptide Sequence
QIQLQQSGAELVKPGASVKLSCKASGYTFTSYDICWVRQRPEQGLEWIGWIFPGDGTTKYTENFKGKATLTTDKSSSTAYMHLSRLTSEDSAVYFCAREGAGSWFAYWGQGTLVTVSA

SEQ ID NO: 348 - protein, 114 aa, synthetic construct
  REGION 1..114: note = VH-52 Peptide Sequence
EVQLQQSGAELVRPGTSVKVSCKASEYAFNNYMMEWVKQRPGQGLEWIGVINPGSGATNYNENFKDKATLTADKSSTTAYMQLSSLTSDDSAVYFCTYNDLGYWGQGTLVTVSA

SEQ ID NO: 349 - protein, 123 aa, synthetic construct
  REGION 1..123: note = VH-53 Peptide Sequence
EVKLQQSGPELMKPGTSMKISCKASGYSFTGYTMNWVKQSHGKNLEWIGLINPYNGGTNYNQKFRGKATLSVDKSSNTAYMELLSLTSEDSAVYYCARKDDYYGSSPYALDYWGQGTSVTVSS

SEQ ID NO: 350 - protein, 116 aa, synthetic construct
  REGION 1..116: note = VH-54 Peptide Sequence
QVQLQQSGAELMKPGASVKISCKATGYTFTNYWIEWVKQRPGHGLEWIGEFLPGDGSSHYNEKFKGKATFTSDTSSNTAYIHLTSLTSEDSAVYYCVRDDYDSDYWAQGTTLTVSS

SEQ ID NO: 351 - protein, 120 aa, synthetic construct
  REGION 1..120: note = VH-55 Peptide Sequence
QVQMKQSGPGLVQPSQSLSITCTVSGFSLINYGVHWVRQSPGKGLEWLGVIWSGGSTDYNAAFISRLSISKDNSKSQVFFKMNSLQADDTAIYYCARIYYYGRGYAMDYWGQGTSVTVSS

SEQ ID NO: 352 - protein, 122 aa, synthetic construct
  REGION 1..122: note = VH-56 Peptide Sequence
EVQLQQSGAEVVKPGAPVKLSCKASGYTFNNYWLNWVKQRPGRGLEWIGRIDPSDSETHYNQKFKDKATLTVDMSSSTAYIQLSSLTSEDSAVYYCARGDYYYGTRGPMDYWGQGTSVTVSS

SEQ ID NO: 353 - protein, 115 aa, synthetic construct
  REGION 1..115: note = VH-57 Peptide Sequence
QVQLQQSGAELVRPGASVNLSCKASGYTFTNYWMNWVKQRPGQGLEWVGMIDPSDSETHYNQMFKDKATLTIDKSSSIAYMQLSSLTSEDSAVYYCARWGAMDYWGQGTSVTVSS

SEQ ID NO: 354 - protein, 121 aa, synthetic construct
  REGION 1..121: note = VH-58 Peptide Sequence
QVQLKQSGPGLVAPSQSLSITCTVSGFSLTSYGVHWVRQPPGKGLEWLGIIWAGGSTNYNPALMSRLSISKDKSKSQVFLKMNSLKTDDTAMYYCARDRASLLRPGAMDYWGQGTSVTVSS

SEQ ID NO: 355 - protein, 118 aa, synthetic construct
  REGION 1..118: note = VH-59 Peptide Sequence
QIQLVQSGPELKKPGETVKISCKASGYTFTNYGMNWVKQAPGKGLKWMGWINTNTGEPTYAEEFKGRFAFSLETSASTAYLQINYLKNEDTATFFCARLDYDYDEDYWGQGTTLTVSS

SEQ ID NO: 356 - protein, 120 aa, synthetic construct
  REGION 1..120: note = VH-60 Peptide Sequence
QVQLVETGPGLVAPSQSLSITCTVSGFSLTSYGVHWIRQSPGKGLEWLGTIWAGGSTDYNSPLMSRLSISKDNSKNQVFLKMNSLQIDDTAIYYCASPPSGYDYDVFASWGQGTLVTVSA

SEQ ID NO: 357 - protein, 120 aa, synthetic construct
  REGION 1..120: note = VH-61 Peptide Sequence
QVQLKQSGPGLVQPSQSLSITCTVSGFSLINYGVHWVRQSPGKGLEWLGVIWSGGSTDYNAAFISRLSISKDNSKSQVFFKMNSLQADDTAIYYCARIYYYGRGYAMDYWGQGTSVTVSS

SEQ ID NO: 358 - protein, 120 aa, synthetic construct
  REGION 1..120: note = VH-62 Peptide Sequence
QVQLKESGPGLVAPSQSLSITCTVSGFSLTSYGVHWIRQPPGKGLEWLGGIWAGGSTDYNSPLMSRLSITKDNSKSQVFLKMNSLQSDDTAMYYCASPPSGYDYDVFAYWGQGTLVTVSA

SEQ ID NO: 359 - protein, 120 aa, synthetic construct
  REGION 1..120: note = VH-63 Peptide Sequence
QVQLKESGPVLVAPSQSLSITCTVSGFSLSSYGVHWVRQPPGKGLEWLGVIWAGGSTDYDSALMSRLSISKDNSKSQVFLKMDSLQTDDTAMYYCAKPPYDYDGAWFAYWGQGTLVTVSA

SEQ ID NO: 360 - protein, 114 aa, synthetic construct
  REGION 1..114: note = VH-64 Peptide Sequence
QVQLQQSGPQLVRPGASVKISCKASGYSFTNYWMHWVKQRPGQGLEWIGMIDPSDSETRLNQKFKDKATLTVDKSSSTAYMQLSSPTSEDSAVYYCATGRPDYWGQGTTLTVSS

SEQ ID NO: 361 - protein, 114 aa, synthetic construct
  REGION 1..114: note = VH-65 Peptide Sequence
QVQLQQSGPQLVRPGASVKISCKASGYSFTSYWMHWVKQRPGQGLEWIGMIDPSDSETRLNQKFKDKATLTVDKSSSTAYMQLSSPTSEDSIVYYCAKGRPDYWGQGTTLTVSS

SEQ ID NO: 362 - protein, 118 aa, synthetic construct
  REGION 1..118: note = VH-66 Peptide Sequence
DGKLQESGPGLVKPSQSLSLTCSVTGYSITSGYYWNWIRQFPGNKLEWMGHISYDGRNNYNPSLKNRISITRDTSKNQFFLKLNSVTTEDTATYYCAGYDFLWYFDVWGTGTTVTVSS

SEQ ID NO: 363 - protein, 121 aa, synthetic construct
  REGION 1..121: note = VH-67 Peptide Sequence
QVQLKESGPGILQPSQTLSLTCSFSGFSLSTFGMGVGWIRQPSGKGLEWLAHIWWDDDKHYNPALKSRLTISKDTSKNQVFLRIANVDTADNATYYCARIDYGDYVGFAYWGQGTLVTVSA

SEQ ID NO: 364 - protein, 118 aa, synthetic construct
  REGION 1..118: note = VH-68 Peptide Sequence
DGQLQESGPGLVKPSQSLSLTCSVTGYSITSGYYWNWIRQFPGNKLEWMGHISYDGRNNYNPSLKNRISITRDTSKNQFFLKLNSVTTEDTATYYCAGYDFLWYFDVWGTGTTVTVSS

SEQ ID NO: 365 - protein, 119 aa, synthetic construct
  REGION 1..119: note = VH-69 Peptide Sequence
EVQLQQSGAELVKSGASVKLSCTASGFNIKDYYMHWVKQRTEQGLEWIGRIYPEDDETKYAPKFQGKATITADTSSNTAYLQLSSLTSEDTAVYYCARSGGYYVWFAYWGQGTLVTVSA

SEQ ID NO: 366 - protein, 121 aa, synthetic construct
  REGION 1..121: note = VH-70 Peptide Sequence
EVQLQQSGPELVKPGSSVKISCKASRYTFTDYNMDWVKQSHGKRLEWIGYIYPNNGGTGYNQKFKGKATLTVDKSSSTAYMELRSLTSEDSAVYYCARSYYDGSYDAMDYWGQGTSVTVSS

SEQ ID NO: 367 - protein, 114 aa, synthetic construct
  REGION 1..114: note = VH-71 Peptide Sequence
QIQLVQSGPELKKPGETVKISCKASGYTFTIFGMNWVKQAPGKGLKWMGWVNTYTGEPTYADDFKGRFAFSLETSASTAYLQINNLKNEDTATYFCARGWFAYWGQGTLVTVSA

SEQ ID NO: 368 - protein, 120 aa, synthetic construct
  REGION 1..120: note = VH-72 Peptide Sequence
QVQLKESGPVLVAPSQSLSITCTVSGFSLTSYGIHWVRQPPGKGLEWLGVIWAGGSTNYNSALMSRLSISKDNSKSQVFLKMNSLQIDDTAMYYCAKPPHDYDQAWFAYWGQGTLITVSA

SEQ ID NO: 369 - protein, 116 aa, synthetic construct
  REGION 1..116: note = VH-73 Peptide Sequence
QVQLQQSGAELVRPGASVKLSCKASGYTFTSSWMNWVKQRPGQGLDWIGMIDPSDSETHYNQMFKDKATLTVDKSSNTAYMQLSRLTSEDSAVYYCVNSNYESGYWGQGTTLTVSS

SEQ ID NO: 370 - protein, 116 aa, synthetic construct
  REGION 1..116: note = VH-74 Peptide Sequence
QVQLQQSGAELVRPGASVKLSCKASGYTFTGYWLNWVKQRPGQGLEWIGMIDPSDSETHYNQVFKDKATMTVDRSSSTAYMQLSGLTSEDSAVYYCANSNYASGSWGQGTTLTVSS

SEQ ID NO: 371 - protein, 120 aa, synthetic construct
  REGION 1..120: note = VH-75 Peptide Sequence
EVQLQQSGPELVKPGASVKVSCKASGYSFTDYNMYWVMQSHGKSLEWIGYIDPYNDATSYSQKFTGKATLTVDKSSSTAFMHLNSLTSEDSAVYYCARWGRYEYYAMDYWGQGTSVTVSS

SEQ ID NO: 372 - protein, 115 aa, synthetic construct
  REGION 1..115: note = VH-76 Peptide Sequence
QVQLKESGPDLVQPSQTLSLTCTVSGFSLTIYGVHWVRQPPGKGLEWVGTVAWDDKKYYNSPLQSRLSISRDTSKNQVFLKLSSLQTEDTAMYYCTMTGGPINYWGPGTSVTVSS

SEQ ID NO: 373 - protein, 117 aa, synthetic construct
  REGION 1..117: note = VH-77 Peptide Sequence
EVQLVESGGGLVKPGGSLKLSCAASGFTFSSYAMSWVRQTPEKRLEWVASISSGDSPYYPDSVKGRFTISRDNARNILYLQMSSLRSEDTAMYYCTRFTTVVEMDYWGQGTSVTVSS

SEQ ID NO: 374 - protein, 112 aa, synthetic construct
  REGION 1..112: note = VL-1 Peptide Sequence
DIVLTQSPLSLPVTPGEPASISCRSSKSLLYKDGKTYLNWFLQKPGQSPQLLIYLMSTHASGVPDRFSGSGSGTDFTLKISRVEAEDVGVYYCQQLVDYPLTFGGGTKLEIK

SEQ ID NO: 375 - protein, 112 aa, synthetic construct
  REGION 1..112: note = VL-2 Peptide Sequence
DIVMTQTPLSLSVTPGQPASISCKSSKSLLHSDGITYLYWYLQKPGQSPQLLIYRMSNLASGVPDRFSGSGSGTDFTLKISRVEAEDVGVYYCAQMLEFPLTFGQGTKLEIK

SEQ ID NO: 376 - protein, 107 aa, synthetic construct
  REGION 1..107: note = VL-3 Peptide Sequence
DILMTQSPSSMSVSLGDTVSITCHASQGINSNMGWLQQKPGKSFKGLIYHATNLEDGVPSRFSGSGSGADYSLTISSLESEDFADYYCVQYAQFPPTFGSGTKLEIK

SEQ ID NO: 377 - protein, 112 aa, synthetic construct
  REGION 1..112: note = VL-4 Peptide Sequence
DVVMTQTPLTLSVAIGQPASISCKSSQSLLYTNGKTYLNWLLQRPGQSPKRLIYLLSKLDSGVPDRFSASGSGTDFTLKISRVEAEDLGVYYCLQSTHFPLTFGAGTKLEMK

SEQ ID NO: 378 - protein, 112 aa, synthetic construct
  REGION 1..112: note = VL-5 Peptide Sequence
DVVMTQTPLTLSVTIGQPASISCKSSQSLFDSDGKTYLNWLLQRPGQSPKRLIYLVSKLDSGVPDRFTGSGSGTDFTLKISRVEAEDLGVYYCWQGTHFPLTFGAGTKLEMK

SEQ ID NO: 379 - protein, 112 aa, synthetic construct
  REGION 1..112: note = VL-6 Peptide Sequence
DVLMTQTPLSLPVSLGDQASISCRSSQSIVHNNGNTYLEWYLQKPGQSPKLLIYKVSNRFSGVPDRFSGSGSGTDFTLKISRVEAEDLGVYYCFQGSHVPLTFGGGTKLELK

SEQ ID NO: 380 - protein, 107 aa, synthetic construct
  REGION 1..107: note = VL-7 Peptide Sequence
DIQMTQTTSSLSASLGDRVTISCSASQGINNYLNWYQQKPDGTVKLLIYYASSLHSGVPSRFSGSGSGTDYSLTISNLEPEDIATYYCQQYSQVPYTFGSGTKLEIK

SEQ ID NO: 381 - protein, 107 aa, synthetic construct
  REGION 1..107: note = VL-8 Peptide Sequence
DIQMNQSPSSLSASLGDTITITCRASQNIYIWLSWYQQKPGNIPKLLIYKASNLHTGVPSRFSGSGSGTDFTLTISTLQPEDIATYFCLQGQSYPLTFGAGTKLEMK

SEQ ID NO: 382 - protein, 107 aa, synthetic construct
  REGION 1..107: note = VL-9 Peptide Sequence
DIQMTQTTSSLSASLGDRVTINCSASQDISNYLNWYQQKPDGTVKLLIYYTSSLLSGVPSRFSGSGSGTDYSLTISNLEPEDIATYFCQQYSKLPYTFGSGTHLEIK

SEQ ID NO: 383 - protein, 112 aa, synthetic construct
  REGION 1..112: note = VL-10 Peptide Sequence
DIVMTQAAFSNPVTLGTSASISCRSSKSLLHSDGITYLYWYLQRPGQSPQLLIYRMSNLASGVPDRFSGSGSGTDFTLRISRVEAEDVGVYYCAQMIEFPLTFGAGTILELK

SEQ ID NO: 384 - protein, 112 aa, synthetic construct
  REGION 1..112: note = VL-11 Peptide Sequence
DVVMTQTPLTLSVAIGQPASISCKSSQSLLYTNGKTYLNWLLQRPGQSPKRLIYLVSKLDSGVPDRFSGSGSGTDFTLKISRVEAEDLGVYYCLQSTHFPLTFGAGTKLELK

SEQ ID NO: 385 - protein, 112 aa, synthetic construct
  REGION 1..112: note = VL-12 Peptide Sequence
DVLMTQTPLSLPVSLGDQASISCRSSQSIVHSNGNTYLEWYLQKPGQSPKLLIYKVSNRFSGVPDRFSGSGSGTDFTLKISRVEAEDLGVYYCFQGSHVPLTFGAGTKLELK

SEQ ID NO: 386 - protein, 112 aa, synthetic construct
  REGION 1..112: note = VL-13 Peptide Sequence
DIVITQDELSNPVTSGESVSISCRSSKSLLYKDGKTYLNWFLQRPGQSPQLLIYLMSTHASGVSDRFSGSGSGTDFTLEISRVKAEDVGVYYCQQLVDYPLTFGAGTKLELK

SEQ ID NO: 387 - protein, 112 aa, synthetic construct
  REGION 1..112: note = VL-14 Peptide Sequence
DIVMTQAAFSNPVTLGTSASISCRSSKSLLHSDGITYLYWYLQRPGQSPQLLIYRMSNLASGVPDRFSGSGSGTDFTLRISRVEAEDVGVYYCAQMLEFPLTFGAGTKLELK

SEQ ID NO: 388 - protein, 112 aa, synthetic construct
  REGION 1..112: note = VL-15 Peptide Sequence
DIVMTQSPLSLPVTPGEPASISCRSSKSLLHSDGITYLYWYLQKPGQSPQLLIYRMSNLASGVPDRFSGSGSGTDFTLKISRVEAEDVGVYYCAQMLEFPLTFGQGTKLEIK

SEQ ID NO: 389 - protein, 113 aa, synthetic construct
  REGION 1..113: note = VL-16 Peptide Sequence
DVVMTQTPLTLSVTIGQPASISCKSSQSLLYTDGKTYLSWFLQRPGQSPKRLIYLVSKLDSGVPDRFSGSGSGTDFTLKISRVEAEDLGVYYCLQSTHFPLTFGAGTKLEVKR

SEQ ID NO: 390 - protein, 108 aa, synthetic construct
  REGION 1..108: note = VL-17 Peptide Sequence
SIVMTQTPKFLLVSAGDRVTITCKASQSVSNDVAWYQQKPGQSPKLLIYYASNRYTGVPDRFTGSGYGTDFTFTISTVQAEDLAVYFCQQDYTSPYTFGGGTKLEIKR

SEQ ID NO: 391 - protein, 108 aa, synthetic construct
  REGION 1..108: note = VL-18 Peptide Sequence
DIQMTQTTSSLSASLGDRVTISCSASQGISNYLNWYQQKPDGTVKLLIYYTSSLHSGVPSRFSGSGSGTDYSLTISNLEPEDIATYYCQQYSELPYTFGSGTKLEIKR

SEQ ID NO: 392 - protein, 108 aa, synthetic construct
  REGION 1..108: note = VL-19 Peptide Sequence
DIVMTQSHKFMSTSVGDRVSITCKASQDVSTAVAWYQQKPGQSPKLLIYWASTRHTGVPDRFTGSGSGTDYTLTISSVQAEDLALYYCQQHYTTPLTFGAGTKLELKR

SEQ ID NO: 393 - protein, 108 aa, synthetic construct
  REGION 1..108: note = VL-20 Peptide Sequence
DIVMTQSQKFMSTSVGERVSITCKASQNVGTNVAWYQQKAGQSLELLIYGASNRHTGVPDRFTGSGSGTDFTLTITNVQSEDMTNYFCEQYSNFPLTFGAGTKLELKR

SEQ ID NO: 394 - protein, 113 aa, synthetic construct
  REGION 1..113: note = VL-21 Peptide Sequence
DVVMTQTPLTLSVTIGQPASISCKSSQSLFHSDGKTYLNWLLQRPGQSPKRLIYLVSKLDSGVPDRFTGSGSGTDFTPKISRVEDEDLGVYYCWQGTHFPLTFGAGTKLEMKR

SEQ ID NO: 395 - protein, 108 aa, synthetic construct
  REGION 1..108: note = VL-22 Peptide Sequence
DIQMNQSPSSLSASLGDTISITCRASQNINIWLSWYQQKPGNIPQLLIYKASNLHTGVPSRFSGSGSGTDFTLTISSLQPEDIATYYCLQGQSYPLTFGAGTKLVMKR

SEQ ID NO: 396 - protein, 111 aa, synthetic construct
  REGION 1..111: note = VL-23 Peptide Sequence
DVVMTQTPLTLSVTIGQPASISCKSSQSLLHSDGKTYLNWLLQRPGQPPKRLMYLVSTLDSGVPDRFTGSGSGTDFTLKISRVEAEDLGVYYCWQGTHFPLTFGAGTKPER

SEQ ID NO: 397 - protein, 111 aa, synthetic construct
  REGION 1..111: note = VL-24 Peptide Sequence
DIVMTQAAFSNPVTLGTSASISCRSSKSLLHSDGITYFYWYLQRPGQSPQLLIYRMSNLASGVPDRFSGSGSGTDFTLRISRVEAEDVGVYYCAQMLEFPLTFGAGTKLER

SEQ ID NO: 398 - protein, 108 aa, synthetic construct
  REGION 1..108: note = VL-25 Peptide Sequence
DIVMTQSHKFMSTSVGDRVSITCKASQDVRTAVAWYQQKPGQSPKLLIYWASTRHTGVPDRFTGSGSGTDFTLTLSNVQSEDLADYFCQQYSSYPWTFGGGTKLEIKR

SEQ ID NO: 399 - protein, 112 aa, synthetic construct
  REGION 1..112: note = VL-26 Peptide Sequence
NIWLTQSPSSLAVSAGEMVTMTCKSSQSVLYSSNQKNYLAWYQQKPGQSPKLLIYWASTRESGVPDRFTGSGSGTDFSLTISSVQAEDLAVYYCHQYLSSLTFGAGTKLELK

SEQ ID NO: 400 - protein, 112 aa, synthetic construct
  REGION 1..112: note = VL-27 Peptide Sequence
NIMMTQSPSSLAVSAGEKVTMSCKSSQSVLYSSNQKNYLAWYQQKPGQSPKLLIYWASTRESGVPDRFTGSGSGTDFTLTISSVQPEDLAVYYCHQYLSSLTFGAGTKLELK

SEQ ID NO: 401 - protein, 112 aa, synthetic construct
  REGION 1..112: note = VL-28 Peptide Sequence
NIMMTQSPSSLAVSAGQKVTMSCKSSQSVLYSSSQKNYLAWYQQKPGQSPKLLIYWASTRESGVPDRFSGSGSGTDFTLTISSVQPEDLAVYYCHQYLSSLTFGAGTKLELK

SEQ ID NO: 402 - protein, 112 aa, synthetic construct
  REGION 1..112: note = VL-29 Peptide Sequence
DVVMTQTPLSLPVSLGDQASISCRSSQSLVHNSGNTYLHWYLQRPGQSPNLLIYKVSNRFSGVPDRFSGSGSGTDFTLKISRVAAEDLGVYFCSQSTHVPPTFGGGTKLEIK

SEQ ID NO: 403 - protein, 109 aa, synthetic construct
  REGION 1..109: note = VL-30 Peptide Sequence
QAVVTQESALTTSPGETVTLTCRSSTGAVTTSNYANWVQEKPDHLFTGLIGGINNRVPGVPARFSGSLIGDKAALTITGAQTEDEAIYFCALWYSNHWVFGGGTKLTVL

SEQ ID NO: 404 - protein, 112 aa, synthetic construct
  REGION 1..112: note = VL-31 Peptide Sequence
DIVMTQAAFSNPVTLGTSASISCRSSKSLLHTNGITFLYWYLQKPGQSPQPLIYQMSNLASGVPDRFSSSGSGTDFTLRISRVEAEDVGVYYCAQNLELPWTFGGGTKLEIN

SEQ ID NO: 405 - protein, 112 aa, synthetic construct
  REGION 1..112: note = VL-32 Peptide Sequence
NIMMTQSPSSLAVSAGEKVTMSCKSSQSVLYSSNQKNYLAWYQQKPGQSPKLLIYWASTRESGVPDRFTGSGSGTDFTLTISSVQAEDLAVYYCHQYLSSLTFGAGTKLELK

SEQ ID NO: 406 - protein, 113 aa, synthetic construct
  REGION 1..113: note = VL-33 Peptide Sequence
DIVMTQSPSSLAMSVGQKVTMSCKSSQSLLNSSNQKNYLAWYQQKPGQSPKLLVYFASTRESGVPDRFIGSGSGTDFTLTISSVQAEDLADYFCQQHYSTPYTFGGGAKLEIK

SEQ ID NO: 407 - protein, 107 aa, synthetic construct
  REGION 1..107: note = VL-34 Peptide Sequence
DIRMTQSPSSLSASLGDTITITCHASQNINVWLSWYQQKPGNIPKLLIYKASNLHTGVPSRFSGSGSGTGFTLTISSLQPEDIATYYCQQGQSYPYTFGGGTKLELK

SEQ ID NO: 408 - protein, 107 aa, synthetic construct
  REGION 1..107: note = VL-35 Peptide Sequence
EIVLTQSPASLSVTTGEKVTIRCITSIDIDDDMNWYQQKPGEPPKLLISEGNTLRPGVPSRFSSSGYGTDFVFTIENTLSEDVADYYCLQSDNKPLTFGAGTKLELK

SEQ ID NO: 409 - protein, 107 aa, synthetic construct
  REGION 1..107: note = VL-36 Peptide Sequence
DIQVIQSPSSLSASLGDTITITCHASQNINVWLSWYQQKPGNIPKLLIYKASNLHTGVPSRFSGSGSGTGFTLTISSLQPEDIATYYCQQGQSYPYTFGGGTKLELK

SEQ ID NO: 410 - protein, 107 aa, synthetic construct
  REGION 1..107: note = VL-37 Peptide Sequence
EIKMNQSPSSLSASLGDTITITCHASQNINVWLSWYQQKPGNIPKLLIYKASNLHTGVPSRFSGSGSGTGFTLTISSLQPEDIATYYCQQGQSYPYTFGGGTKLELK

SEQ ID NO: 411 - protein, 109 aa, synthetic construct
  REGION 1..109: note = VL-38 Peptide Sequence
QAVVTQESALTTSPGETVTLTCRSSTGAVTTSNYANWVQEKPDHLFTGLIGGTNNRAPGVPARFSGSLIGDKAALTITGAQTEDEAIYFCALWYSNHLVFGGGTKLTVL

SEQ ID NO: 412 - protein, 112 aa, synthetic construct
  REGION 1..112: note = VL-39 Peptide Sequence
DVLMTQTPLSLPVSLGDQASISCRSSQDIVHSSGNTYLEWYLQKPGQSLKLLIYKVSNRFSGVPDRFSASGSGTDFTLKISRVEAEDLGVYYCFQGSHVPPTFGSGTKLEIK

SEQ ID NO: 413 - protein, 112 aa, synthetic construct
  REGION 1..112: note = VL-40 Peptide Sequence
DIGMRQAAFSNPVTLGTSASISCRSSKSLLYSNGITYLYWFLQKPGQSPQLLIYQMSNLASGVPDRFSSSGSGTDFTLRISRVEADDVGVYYCAQNLELPWTFGGGTKLEIK

SEQ ID NO: 414 - protein, 111 aa, synthetic construct
  REGION 1..111: note = VL-41 Peptide Sequence
DIVLTQSPASLGVSLGQRATISCRASKSVSTSGYSYMHWYQQKPGQPPKLLIYLASILESGVPARFSGSGSGTDFTLNIHPVEEEDAAIYYCQHSRELPLTFGAGTKLELK

SEQ ID NO: 415 - protein, 111 aa, synthetic construct
  REGION 1..111: note = VL-42 Peptide Sequence
NIVLTQSPASLAVSLGQRATISCRASESVDSYGNSFMHWYQQKPGQPPKLLIYLASNLESGVPARFSGSGSRTDFTLTIDPVEADDAATYYCQQNNEDPWTFGGGTKLEIK

SEQ ID NO: 416 - protein, 112 aa, synthetic construct
  REGION 1..112: note = VL-43 Peptide Sequence
DVVMTQTPLTLSVTIGQPASISCKSSQSLLYSNGKTYLNWLLQRPGQSPKRLIYLVSKLDSGVPDRFTGSGSGTDFTLKISRVEAEDLGVYYCVQGTHFPQTFGGGTKLEIK

SEQ ID NO: 417 - protein, 107 aa, synthetic construct
  REGION 1..107: note = VL-44 Peptide Sequence
DILMTQSPSSMSVSLGDTVSITCHASQGINSNIGWLQQKPGKSFKGLIYHGTNLEDGVPSRFSGSGSGADYSLTISSLESEDFADYYCVQYDQFPWTFGGGTKLEIK

SEQ ID NO: 418 - protein, 111 aa, synthetic construct
  REGION 1..111: note = VL-45 Peptide Sequence
DIVMSQSPASLGVSLGQRATISCRASKSVSTSGYSYMHWYQQKPGQPPKLLIYLASILESGVPARFSGSGSGTDFTLNIHPVEEEDAAIYYCQHSRELPLTFGAGTKLELK

SEQ ID NO: 419 - protein, 111 aa, synthetic construct
  REGION 1..111: note = VL-46 Peptide Sequence
DIVLTQSPASLAVSLGQRATISCRASKSVSTSGYSYMHWYQQKPGQPPKLLIYLASILESGVPARFSGSGSGTDFTLNIHPVEEEDAATYYCQHSRELPLTFGAGTKLELK

SEQ ID NO: 420 - protein, 107 aa, synthetic construct
  REGION 1..107: note = VL-47 Peptide Sequence
DILMTQTPSSMSVSLGDTVSITCHASQGISSNIGWLQQKPRKSFKGLIYYGTNLEDGVPSRFSGSGSGADYSLTISSLESEDFADYYCVQYDQFPWTFGGGTKLEIK

SEQ ID NO: 421 - protein, 111 aa, synthetic construct
  REGION 1..111: note = VL-48 Peptide Sequence
DIVLTQSPASLAVSLGQRATISCRASKSVSTSGYSCMHWYQQKPGQPPKLLIYLASNLESGVPARFSGGGSGTDFTLSIHPVEEEDAATYYCHHSTELPYTFGGGTKLEVE

SEQ ID NO: 422 - protein, 111 aa, synthetic construct
  REGION 1..111: note = VL-49 Peptide Sequence
DIVLTQSPASLAVSLGQRATISCRASESVDSYGNSFMHWYQQKPGQPPKLLIYLASNLESGVPARFSGSGSRTDFTLTIDPVEADDAATYYCQQNNEDPWTFGGGTKLEIK

SEQ ID NO: 423 - protein, 111 aa, synthetic construct
  REGION 1..111: note = VL-50 Peptide Sequence
DVVMTQTPLTLSVTIGQPASISCKSSQSLLYSDGKTYLNWLLQRPGQSPKRLIYLVSQLDSGVPDRFTGSGSGTDFTLKISRVEADDLGVYCCVQGTHLPTFGGGTKLEIK

SEQ ID NO: 424 - protein, 111 aa, synthetic construct
  REGION 1..111: note = VL-51 Peptide Sequence
DIVMTQSPASLAVSLGQRATISCRASESVENHVNSFMHWFQQKPGQPPKLLIYRASNLQSGIPARFSGSGSRTDFTLTINPVEADDVATYYCQQNNEVPYTFGGGTKLEIK

SEQ ID NO: 425 - protein, 106 aa, synthetic construct
  REGION 1..106: note = VL-52 Peptide Sequence
QIVLSQSPAILSASPGEKVTMTCRASSSVTYMYWYQQKPGSSPQPWIYATSNLASGVPARFSGSGSGTSYSLTISRVEAEDAATYYCQQWSSNPLTFGAGTKLELK

SEQ ID NO: 426 - protein, 111 aa, synthetic construct
  REGION 1..111: note = VL-53 Peptide Sequence
DIVLTQSPASLAVSLGQRATISCRASESLDNSGISFMNWFQQRPGQPPKLLIYAASNLESGVPARFSGSGSGTDFSLNIHPMEEDDAAMYFCQHSKEVPWTFGGGTKLEIK

SEQ ID NO: 427 - protein, 107 aa, synthetic construct
  REGION 1..107: note = VL-54 Peptide Sequence
DIVMTQSHKIMSTSVGDRVSITCKASQDVSTTVAWFQQKPGQSPKLLLYWASTRHTGVPDRFTGSGSGTDYTLTISSVQAEDLALYYCQQHYSPPFTFGSGTKLEIK

SEQ ID NO: 428 - protein, 107 aa, synthetic construct
  REGION 1..107: note = VL-55 Peptide Sequence
DIVMTQSQKFMSTSVGDRVSVTCKASQNVGINVAWYQQKPGQSPKALIYSASYRYSGVPDRFTGSGSGTDFTLTISNVQSEDLAEYFCQQYNSYPYTFGGGTKLEMK

SEQ ID NO: 429 - protein, 112 aa, synthetic construct
  REGION 1..112: note = VL-56 Peptide Sequence
DVVMTQTPLTLSVTLGQPASISCRSSQSLLDSDGKTYLNWLLQRPGQSPKRLIYLVSRLDSGVPDRFTGSGSGTDFTLKISRVEAEDLGVYYCWQGTHFPFTFGGGTKLEIK

SEQ ID NO: 430 - protein, 107 aa, synthetic construct
  REGION 1..107: note = VL-57 Peptide Sequence
DIRMTQSPASLSASVGETVTITCRASGNIHNYLAWYHQKQGKSPQLLVYNVKTLADGVPSRFSGSGSGTQFSLKINSLQPEDFGTYYCQHFWSIFPTFGGGTKLEIK

SEQ ID NO: 431 - protein, 106 aa, synthetic construct
  REGION 1..106: note = VL-58 Peptide Sequence
QILLSQSPAILSASPGEKVTMTCRASSSVTYMYWYQQKPGSSPQPWIYATSNLASGVPARFSGSGSGTSYSLTISRVEAEDAATYYCQQWSSNPLTFGAGTKLELK

SEQ ID NO: 432 - protein, 107 aa, synthetic construct
  REGION 1..107: note = VL-59 Peptide Sequence
DILMTQSPASLSASVGETVTITCRASGNIHNYLAWYQQKQGKSPQLLVYSAKTLADGVPSRFSGSGSGTQFSLKIDSLQPEDFGTYYCQHFWSLFPTFGGGTKLEIK

SEQ ID NO: 433 - protein, 107 aa, synthetic construct
  REGION 1..107: note = VL-60 Peptide Sequence
DVVMTQTPKFLLVSAGDRVTITCKASQSVSSDVAWYQQKPGQSPKLLIYFASNRYTGVPDRFTGSGYGTDFTFTISTVQAEDLAVYFCQHNYISPFTFGGGTKLEIK

SEQ ID NO: 434 - protein, 107 aa, synthetic construct
  REGION 1..107: note = VL-61 Peptide Sequence
DIVMTQSHKFMSTSVGDRVSITCKASQDVSTAVAWYQQKPGQSPKLLIYWASTRHTGVPDRFTGSGSGTDYTLTISSVQAEDLALYYCQQHYSTPYTFGGGTKLEIK

SEQ ID NO: 435 - protein, 107 aa, synthetic construct
  REGION 1..107: note = VL-62 Peptide Sequence
DIAMTQSHKFMSTSVGDRVSITCKASQDVSTAVAWYQQKPGQSPKLLIYWASTRHTGVPDRFTGSGSGTDYTLTISSVQAEDLALYYCQQHYNTPYTFGGGTKLEIK

SEQ ID NO: 436 - protein, 112 aa, synthetic construct
  REGION 1..112: note = VL-63 Peptide Sequence
DVGMTQTPLILSVTIGQPASISCKSSQSLLYINGKTYLNWLLQRPGQSPKRLIYLVSKLDSGVPNRFSGSGSGTDFTLKISRVEAEDLGVYYCLQSTHFPQTFGGGTKLEIK

SEQ ID NO: 437 - protein, 107 aa, synthetic construct
  REGION 1..107: note = VL-64 Peptide Sequence
DILLTQSPSSMSVSLGDTVSITCHASQGINSNIGWLQQKPGKSFKGLIYHGTNLEDGVPSRFSGSGSGADYSLTISSLESEDFADYYCVQYDQFPWTFGGGTKLEIK

SEQ ID NO: 438 - protein, 112 aa, synthetic construct
  REGION 1..112: note = VL-65 Peptide Sequence
DIVMTQAAPSVPVTPGESVSISCRSSRSLLHSNGYTYLYWFLQRPGQSPRLLIYRMSNLASGVPDRFSGSGSGTAFTLRISRVEAEDVGVYYCMQHLEYPYTFGGGTKLEIK

SEQ ID NO: 439 - protein, 107 aa, synthetic construct
  REGION 1..107: note = VL-66 Peptide Sequence
DIQMTQTTSSLSASLGDRVTISCSASQGISNYLNWYQQKPDGTVKLLIYYTSSLHSGVPSRFSGSGSGTDYSLTISNLEPEDIATYYCQQYSKLPRTFGGGTKLEIN

SEQ ID NO: 440 - protein, 112 aa, synthetic construct
  REGION 1..112: note = VL-67 Peptide Sequence
DVVMTQTPLTLSVTIGQPASISCKSSRSLLDSDGKTYLNWLLQRPGQSPKRLIYLVSKLDSGVPDRFTGSGSGTDFTLKISRVEAEDLGVYYCWQGTHFPQTFGGGTKLEIN

SEQ ID NO: 441 - protein, 107 aa, synthetic construct
  REGION 1..107: note = VL-68 Peptide Sequence
DIQMNQSPSSLSASLGDTITITCHASQNINVWLSWYQQKPGNIPKLLIYQASNLHTGVPSRFSGRGSGTGFTLTISSLQPEDIATYYCQQGQSSPFTFGSGTKLEIK

SEQ ID NO: 442 - protein, 107 aa, synthetic construct
  REGION 1..107: note = VL-69 Peptide Sequence
DILMTQSHKFMSTSVGDRVSITCKASQDVSSVVVWYQQKPGQSPKQLIYWASTRHTGVPDRFTGSGSGTDYTLTISSVQAEDLALYYCQQHYSTPYTFGGGTKLEIK

SEQ ID NO: 443 - protein, 109 aa, synthetic construct
  REGION 1..109: note = VL-70 Peptide Sequence
QAVVTQESALTTSPGETVTLTCRSSTGAVTTSNYANWDQEKPDHLFTGLIGGTNNRAPGVPARFSGSLIGDKAALTITGAQTEDEAIYFCALWYSNHLVFGGGTKVTVL

SEQ ID NO: 444 - protein, 111 aa, synthetic construct
  REGION 1..111: note = VL-71 Peptide Sequence
DIVMTQSPASLPVSLGQRATISCRASKSVTTSAYSYIHWYQQRPGQPPKLLIYLASNLESGVPARFSGSGSGTDFTLNIHPVEEEDAATYYCQHNRELPPTFGGGTKLEIN

SEQ ID NO: 445 - protein, 107 aa, synthetic construct
  REGION 1..107: note = VL-72 Peptide Sequence
DIVLTQSPATLSVTPGDSVSFSCRASQIINNNLHWYQQKSHESPRLLIRYTSQSISGIPSRFSGSGSGTDFTLSINNVETEDFGMYFCQQTNSWPLTFGAGTKLELK

SEQ ID NO: 446 - protein, 111 aa, synthetic construct
  REGION 1..111: note = VL-73 Peptide Sequence
DVVMTQTPLTLSVTIEQTASISCKSSQSLLDRDGKTYLNWLLQRPGQSPKRLIYLVSKLDSGVPDRFTGSGSGTDFTLKISRVEAEDLGVYYCWQGTHFPTFGGGTKLEIK

SEQ ID NO: 447 - protein, 107 aa, synthetic construct
  REGION 1..107: note = VL-74 Peptide Sequence
DVVMTQTPKFLPITAEDRVTITCKASQSVSNEVAWYQQKPGQSPKLLIYYASNRYTGVPDRFTGSGSGTDFTFTIRSVQLEDLAVYFCQQHYSSPWTFGGGTKLEIK

SEQ ID NO: 448 - protein, 442 aa, synthetic construct
  REGION 1..442: note = TB001 heavy chain peptide sequence
QVQLVQSGSELKKPGASVKVSCKASGYTFTNYGMNWVRQAPGQGLKWMGWINTNTGEPTYVEEFTGRFVFSLETSVSTAYLQISSLKAEDTAVYFCAPYDNFFAYWGQGTTVTVSSASTKGPSVFPLAPCSRSTSESTAALGCLVKDYFPEPVTVSWNSGALTSGVHTFPAVLQSSGLYSLSSVVTVPSSSLGTKTYTCNVDHKPSNTKVDKRVESKYGPPCPPCPAPEFLGGPSVFLFPPKPKDTLMISRTPEVTCVVVDVSQEDPEVQFNWYVDGVEVHNAKTKPREEQFNSTYRVVSVLTVLHQDWLNGKEYKCKVSNKGLPSSIEKTISKAKGQPREPQVYTLPPSQEEMTKNQVSLTCLVKGFYPSDIAVEWESNGQPENNYKTTPPVLDSDGSFFLYSRLTVDKSRWQEGNVFSCSVMHEALHNHYTQKSLSLSLG

SEQ ID NO: 449 - protein, 442 aa, synthetic construct
  REGION 1..442: note = TB006 heavy chain peptide sequence
QVQLVQSGAEVKKPGASVKVSCKASGYSFTNYYMHWVRQAPGQRLEWMGWIYPGSGNTNYNEKFQGRVTITADTSASTAYMELSSLRSEDTAVYYCSTAPGGFDVWGQGTTVTVSSASTKGPSVFPLAPCSRSTSESTAALGCLVKDYFPEPVTVSWNSGALTSGVHTFPAVLQSSGLYSLSSVVTVPSSSLGTKTYTCNVDHKPSNTKVDKRVESKYGPPCPPCPAPEFLGGPSVFLFPPKPKDTLMISRTPEVTCVVVDVSQEDPEVQFNWYVDGVEVHNAKTKPREEQFNSTYRVVSVLTVLHQDWLNGKEYKCKVSNKGLPSSIEKTISKAKGQPREPQVYTLPPSQEEMTKNQVSLTCLVKGFYPSDIAVEWESNGQPENNYKTTPPVLDSDGSFFLYSRLTVDKSRWQEGNVFSCSVMHEALHNHYTQKSLSLSLG

SEQ ID NO: 450 - protein, 452 aa, synthetic construct
  REGION 1..452: note = 12G5.D7 heavy chain peptide sequence
QVQLKQSGAELVRPGASVKLSCKASGYTFTDYYINWVKQRPGQGLEWIARIYPGTGNTDYNEKFKGRATLTAEKSSSTAYMQLSSLTSEDSAVYFCARFAYYYGSGGYFDYWGHGTTLTVSSAKTTPPSVYPLAPVCGDTTGSSVTLGCLVKGYFPEPVTLTWNSGSLSSGVHTFPAVLQSDLYTLSSSVTVTSSTWPSQSITCNVAHPASSTKVDKKIEPRGPTIKPCPPCKCPAPNAAGGPSVFIFPPKIKDVLMISLSPIVTCVVVDVSEDDPDVQISWFVNNVEVHTAQTQTHREDYNSTLRVVSALPIQHQDWMSGKEFKCKVNNKDLGAPIERTISKPKGSVRAPQVYVLPPPEEEMTKKQVTLTCMVTDFMPEDIYVEWTNNGKTELNYKNTEPVLDSDGSYFMYSKLRVEKKNWVERNSYSCSVVHEGLHNHHTTKSFSRTPGK

SEQ ID NO: 451 - protein, 449 aa, synthetic construct
  REGION 1..449: note = 13A12.2E5 heavy chain peptide sequence
QIQLVQSGPELKKPGETVKISCKTSGYKFKTYVMSWVKQAPGKALKWMGWINTYSGVPTYADDFKGRFAFSLETSASTAYLEIINLKNEDTATYFCARDGNYGDPMDYWGQGTSVTVSSAKTTPPSVYPLAPVCGDTTGSSVTLGCLVKGYFPEPVTLTWNSGSLSSGVHTFPAVLQSDLYTLSSSVTVTSSTWPSQSITCNVAHPASSTKVDKKIEPRGPTIKPCPPCKCPAPNAAGGPSVFIFPPKIKDVLMISLSPIVTCVVVDVSEDDPDVQISWFVNNVEVHTAQTQTHREDYNSTLRVVSALPIQHQDWMSGKEFKCKVNNKDLGAPIERTISKPKGSVRAPQVYVLPPPEEEMTKKQVTLTCMVTDFMPEDIYVEWTNNGKTELNYKNTEPVLDSDGSYFMYSKLRVEKKNWVERNSYSCSVVHEGLHNHHTTKSFSRTPGK

SEQ ID NO: 452 - protein, 447 aa, synthetic construct
  REGION 1..447: note = 14H10.2C9 heavy chain peptide sequence
QIQLVQSGPELKKPGETVKISCKASGYTFTTYGMGWVKQAPGKDLKWMGWINTYSGVPTYADDFKGRFAFSLETSASTAYLQISNLKNEDTATYFCSTPYEYDGAYWGQGTLVTVSAAKTTPPSVYPLAPVCGDTTGSSVTLGCLVKGYFPEPVTLTWNSGSLSSGVHTFPAVLQSDLYTLSSSVTVTSSTWPSQSITCNVAHPASSTKVDKKIEPRGPTIKPCPPCKCPAPNAAGGPSVFIFPPKIKDVLMISLSPIVTCVVVDVSEDDPDVQISWFVNNVEVHTAQTQTHREDYNSTLRVVSALPIQHQDWMSGKEFKCKVNNKDLGAPIERTISKPKGSVRAPQVYVLPPPEEEMTKKQVTLTCMVTDFMPEDIYVEWTNNGKTELNYKNTEPVLDSDGSYFMYSKLRVEKKNWVERNSYSCSVVHEGLHNHHTTKSFSRTPGK

SEQ ID NO: 453 - protein, 443 aa, synthetic construct
  REGION 1..443: note = 15F10.2D6 heavy chain peptide sequence
EVQLVESGGGLVKPGGSLKLSCAASGFAFSSYAMSWVRQTPEKRLEWVATISDGGVYTYYTDHVKGRFTISRDNAEDNLYLQMSHLKSEDTAMYYCVRDGGYWGQGTTLTVSSAKTTPPSVYPLAPVCGDTTGSSVTLGCLVKGYFPEPVTLTWNSGSLSSGVHTFPAVLQSDLYTLSSSVTVTSSTWPSQSITCNVAHPASSTKVDKKIEPRGPTIKPCPPCKCPAPNAAGGPSVFIFPPKIKDVLMISLSPIVTCVVVDVSEDDPDVQISWFVNNVEVHTAQTQTHREDYNSTLRVVSALPIQHQDWMSGKEFKCKVNNKDLGAPIERTISKPKGSVRAPQVYVLPPPEEEMTKKQVTLTCMVTDFMPEDIYVEWTNNGKTELNYKNTEPVLDSDGSYFMYSKLRVEKKNWVERNSYSCSVVHEGLHNHHTTKSFSRTPGK

SEQ ID NO: 454 - protein, 446 aa, synthetic construct
  REGION 1..446: note = 19B5.2E6 heavy chain peptide sequence
QIQLVQSGPELKKPGETVKISCKASGYTFTTYAMSWVKQAPGKGLKWMGWINTYSGVPTYADDLKGRFAFSLETSASTAYLQINNLKNEDTATYFCARGPYAMDYWGQGTSVTVSSAKTTPPSVYPLAPVCGDTTGSSVTLGCLVKGYFPEPVTLTWNSGSLSSGVHTFPAVLQSDLYTLSSSVTVTSSTWPSQSITCNVAHPASSTKVDKKIEPRGPTIKPCPPCKCPAPNAAGGPSVFIFPPKIKDVLMISLSPIVTCVVVDVSEDDPDVQISWFVNNVEVHTAQTQTHREDYNSTLRVVSALPIQHQDWMSGKEFKCKVNNKDLGAPIERTISKPKGSVRAPQVYVLPPPEEEMTKKQVTLTCMVTDFMPEDIYVEWTNNGKTELNYKNTEPVLDSDGSYFMYSKLRVEKKNWVERNSYSCSVVHEGLHNHHTTKSFSRTPGK

SEQ ID NO: 455 - protein, 445 aa, synthetic construct
  REGION 1..445: note = 20D11.2C6 heavy chain peptide sequence
EVQLQQSGPELVKPGASVKISCKASGYTFTDFYINWVKQSHGKSLEWIGDINPKNGGINYNPKFKIKATLTVDKSSSTSYMDLRGLTSEDSAVYYCTSGYGFPYWGQGTLVTVSAAKTTPPSVYPLAPVCGDTTGSSVTLGCLVKGYFPEPVTLTWNSGSLSSGVHTFPAVLQSDLYTLSSSVTVTSSTWPSQSITCNVAHPASSTKVDKKIEPRGPTIKPCPPCKCPAPNAAGGPSVFIFPPKIKDVLMISLSPIVTCVVVDVSEDDPDVQISWFVNNVEVHTAQTQTHREDYNSTLRVVSALPIQHQDWMSGKEFKCKVNNKDLGAPIERTISKPKGSVRAPQVYVLPPPEEEMTKKQVTLTCMVTDFMPEDIYVEWTNNGKTELNYKNTEPVLDSDGSYFMYSKLRVEKKNWVERNSYSCSVVHEGLHNHHTTKSFSRTPGK

SEQ ID NO: 456 - protein, 446 aa, synthetic construct
  REGION 1..446: note = 20H5.A3 heavy chain peptide sequence
QIQLVQSGPELKKPGESVKISCKASGYAFTTYGMSWVQQAPGKGLKWMGWVNTYSGVPTCADDFKGRFAFSLETSASTAYLQINNLRNEDTATYFCARGPYAMDYWGQGTSVTVSSAKTTPPSVYPLAPVCGDTTGSSVTLGCLVKGYFPEPVTLTWNSGSLSSGVHTFPAVLQSDLYTLSSSVTVTSSTWPSQSITCNVAHPASSTKVDKKIEPRGPTIKPCPPCKCPAPNAAGGPSVFIFPPKIKDVLMISLSPIVTCVVVDVSEDDPDVQISWFVNNVEVHTAQTQTHREDYNSTLRVVSALPIQHQDWMSGKEFKCKVNNKDLGAPIERTISKPKGSVRAPQVYVLPPPEEEMTKKQVTLTCMVTDFMPEDIYVEWTNNGKTELNYKNTEPVLDSDGSYFMYSKLRVEKKNWVERNSYSCSVVHEGLHNHHTTKSFSRTPGK

SEQ ID NO: 457 - protein, 446 aa, synthetic construct; identical to SEQ ID NO: 454
  REGION 1..446: note = 23H9.2E4 heavy chain peptide sequence

SEQ ID NO: 458 - protein, 450 aa, synthetic construct
  REGION 1..450: note = 2D10.2B2 heavy chain peptide sequence
QVQLQQSGPELVKPGASVKISCKASGYTFTDYYINWVKQRPGQGLEWIGWIYPGSNDTKYNEKFKGKATLTVDTSSSTAYMQLGSLTSEDSAVYFCANYFGCSGWFFDVWGTGTTVTVSSAKTTPPSVYPLAPVCGDTTGSSVTLGCLVKGYFPEPVTLTWNSGSLSSGVHTFPAVLQSDLYTLSSSVTVTSSTWPSQSITCNVAHPASSTKVDKKIEPRGPTIKPCPPCKCPAPNAAGGPSVFIFPPKIKDVLMISLSPIVTCVVVDVSEDDPDVQISWFVNNVEVHTAQTQTHREDYNSTLRVVSALPIQHQDWMSGKEFKCKVNNKDLGAPIERTISKPKGSVRAPQVYVLPPPEEEMTKKQVTLTCMVTDFMPEDIYVEWTNNGKTELNYKNTEPVLDSDGSYFMYSKLRVEKKNWVERNSYSCSVVHEGLHNHHTTKSFSRTPGK

SEQ ID NO: 459 - protein, 449 aa, synthetic construct; identical to SEQ ID NO: 451
  REGION 1..449: note = 3B11.2G2 heavy chain peptide sequence

SEQ ID NO: 460 - protein, 443 aa, synthetic construct
  REGION 1..443: note = 7D8.2D8 heavy chain peptide sequence
EVQLVESGGGLVKPGGSLKLSCAASGFTFSSYAMSWVRQTPEKRLEWVATISDGGIYTYYPDNVKGRFTISRDNAKNNLFLQMSHLKSEDTAMYYCVRDGGYWGQGTTLTVSSAKTTPPSVYPLAPVCGDTTGSSVTLGCLVKGYFPEPVTLTWNSGSLSSGVHTFPAVLQSDLYTLSSSVTVTSSTWPSQSITCNVAHPASSTKVDKKIEPRGPTIKPCPPCKCPAPNAAGGPSVFIFPPKIKDVLMISLSPIVTCVVVDVSEDDPDVQISWFVNNVEVHTAQTQTHREDYNSTLRVVSALPIQHQDWMSGKEFKCKVNNKDLGAPIERTISKPKGSVRAPQVYVLPPPEEEMTKKQVTLTCMVTDFMPEDIYVEWTNNGKTELNYKNTEPVLDSDGSYFMYSKLRVEKKNWVERNSYSCSVVHEGLHNHHTTKSFSRTPGK

SEQ ID NO: 461 - protein, 446 aa, synthetic construct
  REGION 1..446: note = mTB001 heavy chain peptide sequence
QIQLVQSGPELKKPGETVKISCKASGYTFTNYGMNWVKQAPGKGLKWMGWINTNTGEPTYVEEFKGRFAFSLETSASTAYLQINNLKNEDTATYFCAPYDNFFAYWGQGTLVTVSAAKTTPPSVYPLAPVCGDTTGSSVTLGCLVKGYFPEPVTLTWNSGSLSSGVHTFPAVLQSDLYTLSSSVTVTSSTWPSQSITCNVAHPASSTKVDKKIEPRGPTIKPCPPCKCPAPNAAGGPSVFIFPPKIKDVLMISLSPIVTCVVVDVSEDDPDVQISWFVNNVEVHTAQTQTHREDYNSTLRVVSALPIQHQDWMSGKEFKCKVNNKDLGAPIERTISKPKGSVRAPQVYVLPPPEEEMTKKQVTLTCMVTDFMPEDIYVEWTNNGKTELNYKNTEPVLDSDGSYFMYSKLRVEKKNWVERNSYSCSVVHEGLHNHHTTKSFSRTPGK

SEQ ID NO: 462 - protein, 442 aa, synthetic construct
  REGION 1..442: note = 4A11.2B5 heavy chain peptide sequence
QVQLQQSGPELVKPGASVKISCKASGYSFTNYYIHWVKQRPGQGLEWIGWIYPGSGNTNYNEKFKGKATLTADTSSSTTNMQLSSLTSEDSAVYYCSTAPGGFDVWGSGTTVTVSSASTKGPSVFPLAPCSRSTSESTAALGCLVKDYFPEPVTVSWNSGALTSGVHTFPAVLQSSGLYSLSSVVTVPSSSLGTKTYTCNVDHKPSNTKVDKRVESKYGPPCPPCPAPEFLGGPSVFLFPPKPKDTLMISRTPEVTCVVVDVSQEDPEVQFNWYVDGVEVHNAKTKPREEQFNSTYRVVSVLTVLHQDWLNGKEYKCKVSNKGLPSSIEKTISKAKGQPREPQVYTLPPSQEEMTKNQVSLTCLVKGFYPSDIAVEWESNGQPENNYKTTPPVLDSDGSFFLYSRLTVDKSRWQEGNVFSCSVMHEALHNHYTQKSLSLSLG

SEQ ID NO: 463 - protein, 442 aa, synthetic construct
  REGION 1..442: note = 4A11.H1L1 heavy chain peptide sequence
QVQLVQSGAEVKKPGASVKVSCKASGYSFTNYYMHWVRQAPGQGLEWMGWIYPGSGNTNYNEKFQGRVTMTADTSISTAYMELSRLRSDDTAVYYCSTAPGGFDVWGQGTTVTVSSASTKGPSVFPLAPCSRSTSESTAALGCLVKDYFPEPVTVSWNSGALTSGVHTFPAVLQSSGLYSLSSVVTVPSSSLGTKTYTCNVDHKPSNTKVDKRVESKYGPPCPPCPAPEFLGGPSVFLFPPKPKDTLMISRTPEVTCVVVDVSQEDPEVQFNWYVDGVEVHNAKTKPREEQFNSTYRVVSVLTVLHQDWLNGKEYKCKVSNKGLPSSIEKTISKAKGQPREPQVYTLPPSQEEMTKNQVSLTCLVKGFYPSDIAVEWESNGQPENNYKTTPPVLDSDGSFFLYSRLTVDKSRWQEGNVFSCSVMHEALHNHYTQKSLSLSLG

SEQ ID NO: 464 - protein, 442 aa, synthetic construct
  REGION 1..442: note = 4A11.H4L2 heavy chain peptide sequence
QVQLVQSGAEVKKPGASVKVSCKASGYSFTNYYIHWVRQAPGQRLEWMGWIYPGSGNTNYNEKFQGRVTLTADTSASTTYMELSSLRSEDTAVYYCSTAPGGFDVWGQGTTVTVSSASTKGPSVFPLAPCSRSTSESTAALGCLVKDYFPEPVTVSWNSGALTSGVHTFPAVLQSSGLYSLSSVVTVPSSSLGTKTYTCNVDHKPSNTKVDKRVESKYGPPCPPCPAPEFLGGPSVFLFPPKPKDTLMISRTPEVTCVVVDVSQEDPEVQFNWYVDGVEVHNAKTKPREEQFNSTYRVVSVLTVLHQDWLNGKEYKCKVSNKGLPSSIEKTISKAKGQPREPQVYTLPPSQEEMTKNQVSLTCLVKGFYPSDIAVEWESNGQPENNYKTTPPVLDSDGSFFLYSRLTVDKSRWQEGNVFSCSVMHEALHNHYTQKSLSLSLG

SEQ ID NO: 465 - protein, 445 aa, synthetic construct
  REGION 1..445: note = 4G2.2G6 heavy chain peptide sequence
QIQLVQSGPDLKKPGETVKISCKASGYTFTTYVMSWVKQAPGKDLKWMGWINTHSGVPTYADDFKGRFDFSLETSANTAFLQINNLKNEDTATYFCTRDGNDGDAMDNWGQGTSVTVSSASTKGPSVFPLAPCSRSTSESTAALGCLVKDYFPEPVTVSWNSGALTSGVHTFPAVLQSSGLYSLSSVVTVPSSSLGTKTYTCNVDHKPSNTKVDKRVESKYGPPCPPCPAPEFLGGPSVFLFPPKPKDTLMISRTPEVTCVVVDVSQEDPEVQFNWYVDGVEVHNAKTKPREEQFNSTYRVVSVLTVLHQDWLNGKEYKCKVSNKGLPSSIEKTISKAKGQPREPQVYTLPPSQEEMTKNQVSLTCLVKGFYPSDIAVEWESNGQPENNYKTTPPVLDSDGSFFLYSRLTVDKSRWQEGNVFSCSVMHEALHNHYTQKSLSLSLG

SEQ ID NO: 466 - protein, 446 aa, synthetic construct
  REGION 1..446: note = 6B3.2D3 heavy chain peptide sequence
QVQLKQSGPGLVQPSQSLSITCTVSGFSLTSYGVHWVRQPPGKGLEWLGVIWSGGSTDYNAAFISRLSISKDNSKSQVFFKMNSLQADDTAIYYCAKGPYDYDLGWFAYWGQGTLVTVSAASTKGPSVFPLAPCSRSTSESTAALGCLVKDYFPEPVTVSWNSGALTSGVHTFPAVLQSSGLYSLSSVVTVPSSSLGTKTYTCNVDHKPSNTKVDKRVESKYGPPCPPCPAPEFLGGPSVFLFPPKPKDTLMISRTPEVTCVVVDVSQEDPEVQFNWYVDGVEVHNAKTKPREEQFNSTYRVVSVLTVLHQDWLNGKEYKCKVSNKGLPSSIEKTISKAKGQPREPQVYTLPPSQEEMTKNQVSLTCLVKGFYPSDIAVEWESNGQPENNYKTTPPVLDSDGSFFLYSRLTVDKSRWQEGNVFSCSVMHEALHNHYTQKSLSLSLG

SEQ ID NO: 467 - protein, 442 aa, synthetic construct
  REGION 1..442: note = 6H6.2D6 heavy chain peptide sequence
QIQLVQSGPELKKPGETVKISCKASGYTFTTYGMSWVKQAPGKGLKWMAWINTYSGVPTYADDFKGRFAFSLETSASTAYLQINNLTNEDTATYFCARGPYAMDYWGQGTSVTVSSASTKGPSVFPLAPCSRSTSESTAALGCLVKDYFPEPVTVSWNSGALTSGVHTFPAVLQSSGLYSLSSVVTVPSSSLGTKTYTCNVDHKPSNTKVDKRVESKYGPPCPPCPAPEFLGGPSVFLFPPKPKDTLMISRTPEVTCVVVDVSQEDPEVQFNWYVDGVEVHNAKTKPREEQFNSTYRVVSVLTVLHQDWLNGKEYKCKVSNKGLPSSIEKTISKAKGQPREPQVYTLPPSQEEMTKNQVSLTCLVKGFYPSDIAVEWESNGQPENNYKTTPPVLDSDGSFFLYSRLTVDKSRWQEGNVFSCSVMHEALHNHYTQKSLSLSLG

SEQ ID NO: 468 - protein, 441 aa, synthetic construct
  REGION 1..441: note = 9H2.2H10 heavy chain peptide sequence
QVQLQQPGAELVGPGSSVKLSCKASGYTFTNYWIHWVKQRPLQGLEWIGNIDPSDSETHYNQKFKDKATLTVDKSSSTAYMQLSSLTSEDSAVYYCARHGYYDYWGQGTTLTVSSASTKGPSVFPLAPCSRSTSESTAALGCLVKDYFPEPVTVSWNSGALTSGVHTFPAVLQSSGLYSLSSVVTVPSSSLGTKTYTCNVDHKPSNTKVDKRVESKYGPPCPPCPAPEFLGGPSVFLFPPKPKDTLMISRTPEVTCVVVDVSQEDPEVQFNWYVDGVEVHNAKTKPREEQFNSTYRVVSVLTVLHQDWLNGKEYKCKVSNKGLPSSIEKTISKAKGQPREPQVYTLPPSQEEMTKNQVSLTCLVKGFYPSDIAVEWESNGQPENNYKTTPPVLDSDGSFFLYSRLTVDKSRWQEGNVFSCSVMHEALHNHYTQKSLSLSLG

SEQ ID NO: 469 - protein, 445 aa, synthetic construct
  REGION 1..445: note = 13G4.2F8 heavy chain peptide sequence
QVQLQQPGAELVKPGASVKLSCKASGYTFTSYWMHWVKQRPGQGLEWIGMIHPNSGSTDYNEKFKNKATLNVDKSSSTAYIQLSSLTSEDSAVYYCTRWGIYYYARDYWGQGTTLTVSSASTKGPSVFPLAPCSRSTSESTAALGCLVKDYFPEPVTVSWNSGALTSGVHTFPAVLQSSGLYSLSSVVTVPSSSLGTKTYTCNVDHKPSNTKVDKRVESKYGPPCPPCPAPEFLGGPSVFLFPPKPKDTLMISRTPEVTCVVVDVSQEDPEVQFNWYVDGVEVHNAKTKPREEQFNSTYRVVSVLTVLHQDWLNGKEYKCKVSNKGLPSSIEKTISKAKGQPREPQVYTLPPSQEEMTKNQVSLTCLVKGFYPSDIAVEWESNGQPENNYKTTPPVLDSDGSFFLYSRLTVDKSRWQEGNVFSCSVMHEALHNHYTQKSLSLSLG

SEQ ID NO: 470 - protein, 443 aa, synthetic construct
  REGION 1..443: note = 13H12.2F8 heavy chain peptide sequence
QIQLVQSGPELKKPGETVKISCKASGYTFTTYGMSWVKQAPGKGLKWMGWINTYSGVPTYADDFKGRFAFSLETSASTAYLQINNLKNEDTATYFCAVPYEYDGAYWGQGTLVTVSAASTKGPSVFPLAPCSRSTSESTAALGCLVKDYFPEPVTVSWNSGALTSGVHTFPAVLQSSGLYSLSSVVTVPSSSLGTKTYTCNVDHKPSNTKVDKRVESKYGPPCPPCPAPEFLGGPSVFLFPPKPKDTLMISRTPEVTCVVVDVSQEDPEVQFNWYVDGVEVHNAKTKPREEQFNSTYRVVSVLTVLHQDWLNGKEYKCKVSNKGLPSSIEKTISKAKGQPREPQVYTLPPSQEEMTKNQVSLTCLVKGFYPSDIAVEWESNGQPENNYKTTPPVLDSDGSFFLYSRLTVDKSRWQEGNVFSCSVMHEALHNHYTQKSLSLSLG

SEQ ID NO: 471 - protein, 441 aa, synthetic construct
  REGION 1..441: note = 15G7.2A7 heavy chain peptide sequence
EVQLQQSGPELVKPGASVKISCKASGYTFTDYYMNWVKQSHGKSLEWIGDINPNNGGTNYNQKFKGKATLTVDKSSSTAYMELRSLTSEDSAVYYCTSGYGFPYWGQGTLVTVSAASTKGPSVFPLAPCSRSTSESTAALGCLVKDYFPEPVTVSWNSGALTSGVHTFPAVLQSSGLYSLSSVVTVPSSSLGTKTYTCNVDHKPSNTKVDKRVESKYGPPCPPCPAPEFLGGPSVFLFPPKPKDTLMISRTPEVTCVVVDVSQEDPEVQFNWYVDGVEVHNAKTKPREEQFNSTYRVVSVLTVLHQDWLNGKEYKCKVSNKGLPSSIEKTISKAKGQPREPQVYTLPPSQEEMTKNQVSLTCLVKGFYPSDIAVEWESNGQPENNYKTTPPVLDSDGSFFLYSRLTVDKSRWQEGNVFSCSVMHEALHNHYTQKSLSLSLG

SEQ ID NO: 472 - protein, 443 aa, synthetic construct
  REGION 1..443: note = 19D9.2E5 heavy chain peptide sequence
QIQLVQSGPELKKPGETVKISCKASGYTFTTYGMGWVKQAPGKGLKWMGWINTYSGVPTYADDFKGRFAFSLETSTSTAYLQINNLKNEDMATYFCATPYEYDGAYWGQGTLVTVSAASTKGPSVFPLAPCSRSTSESTAALGCLVKDYFPEPVTVSWNSGALTSGVHTFPAVLQSSGLYSLSSVVTVPSSSLGTKTYTCNVDHKPSNTKVDKRVESKYGPPCPPCPAPEFLGGPSVFLFPPKPKDTLMISRTPEVTCVVVDVSQEDPEVQFNWYVDGVEVHNAKTKPREEQFNSTYRVVSVLTVLHQDWLNGKEYKCKVSNKGLPSSIEKTISKAKGQPREPQVYTLPPSQEEMTKNQVSLTCLVKGFYPSDIAVEWESNGQPENNYKTTPPVLDSDGSFFLYSRLTVDKSRWQEGNVFSCSVMHEALHNHYTQKSLSLSLG

SEQ ID NO: 473 - protein, 438 aa, synthetic construct
  REGION 1..438: note = 23B10.2B12 heavy chain peptide sequence
QVQLQQSGPELVKPGDSVKISCKAAGYTFSDYYINWVKQRPGQGLEWIGWIYPVSVNTKYNEKFKGKATLTVDTSSSTAYMQLSSLTSEDSGVYFCAYLDYWGQGTLVTVSAASTKGPSVFPLAPCSRSTSESTAALGCLVKDYFPEPVTVSWNSGALTSGVHTFPAVLQSSGLYSLSSVVTVPSSSLGTKTYTCNVDHKPSNTKVDKRVESKYGPPCPPCPAPEFLGGPSVFLFPPKPKDTLMISRTPEVTCVVVDVSQEDPEVQFNWYVDGVEVHNAKTKPREEQFNSTYRVVSVLTVLHQDWLNGKEYKCKVSNKGLPSSIEKTISKAKGQPREPQVYTLPPSQEEMTKNQVSLTCLVKGFYPSDIAVEWESNGQPENNYKTTPPVLDSDGSFFLYSRLTVDKSRWQEGNVFSCSVMHEALHNHYTQKSLSLSLG

SEQ ID NO: 474 - protein, 446 aa, synthetic construct
  REGION 1..446: note = 24D12.2H9 heavy chain peptide sequence
QVQLKQSGPGLVQPSQSLSITCTVSGFSLTSYGVHWVRQAPGKGLEWLGVIWSGGSTDYNAAFMSRLSISKDNSKSQVFFKMNSLQADDTAIYYCAKSPDGYDVAWFGYWGQGTLVTVSAASTKGPSVFPLAPCSRSTSESTAALGCLVKDYFPEPVTVSWNSGALTSGVHTFPAVLQSSGLYSLSSVVTVPSSSLGTKTYTCNVDHKPSNTKVDKRVESKYGPPCPPCPAPEFLGGPSVFLFPPKPKDTLMISRTPEVTCVVVDVSQEDPEVQFNWYVDGVEVHNAKTKPREEQFNSTYRVVSVLTVLHQDWLNGKEYKCKVSNKGLPSSIEKTISKAKGQPREPQVYTLPPSQEEMTKNQVSLTCLVKGFYPSDIAVEWESNGQPENNYKTTPPVLDSDGSFFLYSRLTVDKSRWQEGNVFSCSVMHEALHNHYTQKSLSLSLG

SEQ ID NO: 475 - protein, 448 aa, synthetic construct
  REGION 1..448: note = F846C.1B2 heavy chain peptide sequence
QIQLVQSGPELKKPGETVKISCKASGYTFTNYGMNWVKQAPGKGLKWMGWINTYTGEPSYADDFKGRFAFSLETSASTAYLQINNLKNEDMATYFCARWGGYAGDYYAMDFWGQGTSVTVSSASTKGPSVFPLAPCSRSTSESTAALGCLVKDYFPEPVTVSWNSGALTSGVHTFPAVLQSSGLYSLSSVVTVPSSSLGTKTYTCNVDHKPSNTKVDKRVESKYGPPCPPCPAPEFLGGPSVFLFPPKPKDTLMISRTPEVTCVVVDVSQEDPEVQFNWYVDGVEVHNAKTKPREEQFNSTYRVVSVLTVLHQDWLNGKEYKCKVSNKGLPSSIEKTISKAKGQPREPQVYTLPPSQEEMTKNQVSLTCLVKGFYPSDIAVEWESNGQPENNYKTTPPVLDSDGSFFLYSRLTVDKSRWQEGNVFSCSVMHEALHNHYTQKSLSLSLG

SEQ ID NO: 476 - protein, 448 aa, synthetic construct
  REGION 1..448: note = F846C.1F5 heavy chain peptide sequence
QIQLVQSGPELKKPGETVKISCKASGYTFTNYGMNWVKQAPGKGLKWMGWINTYTGEPSYADDFKGRFAFSLETSASTAYLQINNLKNEDMATYFCARWGGYDGDYYAMDYWGQGTSVTVSSASTKGPSVFPLAPCSRSTSESTAALGCLVKDYFPEPVTVSWNSGALTSGVHTFPAVLQSSGLYSLSSVVTVPSSSLGTKTYTCNVDHKPSNTKVDKRVESKYGPPCPPCPAPEFLGGPSVFLFPPKPKDTLMISRTPEVTCVVVDVSQEDPEVQFNWYVDGVEVHNAKTKPREEQFNSTYRVVSVLTVLHQDWLNGKEYKCKVSNKGLPSSIEKTISKAKGQPREPQVYTLPPSQEEMTKNQVSLTCLVKGFYPSDIAVEWESNGQPENNYKTTPPVLDSDGSFFLYSRLTVDKSRWQEGNVFSCSVMHEALHNHYTQKSLSLSLG

SEQ ID NO: 477 - protein, 448 aa, synthetic construct
  REGION 1..448: note = F846C.1H12 heavy chain peptide sequence
QIQLVQSGPELKKPGETVKISCKASGYTFTNFGMNWVKQAPGKGLKWMGWINTYTGEPSYADDFKGRFAFSLETSASTAYLQINNLKNEDIATYFCARWGGYAGDYYAMDYWGQGTSVTVSSASTKGPSVFPLAPCSRSTSESTAALGCLVKDYFPEPVTVSWNSGALTSGVHTFPAVLQSSGLYSLSSVVTVPSSSLGTKTYTCNVDHKPSNTKVDKRVESKYGPPCPPCPAPEFLGGPSVFLFPPKPKDTLMISRTPEVTCVVVDVSQEDPEVQFNWYVDGVEVHNAKTKPREEQFNSTYRVVSVLTVLHQDWLNGKEYKCKVSNKGLPSSIEKTISKAKGQPREPQVYTLPPSQEEMTKNQVSLTCLVKGFYPSDIAVEWESNGQPENNYKTTPPVLDSDGSFFLYSRLTVDKSRWQEGNVFSCSVMHEALHNHYTQKSLSLSLG

SEQ ID NO: 478 - protein, 442 aa, synthetic construct
  REGION 1..442: note = F846C.1H5 heavy chain peptide sequence
EVQLLESGGGLVKPGGSLKLSCAASGFTFSSYAMSWVRQTPEKRLEWVASISSGGDTYYPDSVKGRFTISRDNARNILYLQMSSLRSEDTAMYYCASYGNSLFDYWGQGTTLTVSSASTKGPSVFPLAPCSRSTSESTAALGCLVKDYFPEPVTVSWNSGALTSGVHTFPAVLQSSGLYSLSSVVTVPSSSLGTKTYTCNVDHKPSNTKVDKRVESKYGPPCPPCPAPEFLGGPSVFLFPPKPKDTLMISRTPEVTCVVVDVSQEDPEVQFNWYVDGVEVHNAKTKPREEQFNSTYRVVSVLTVLHQDWLNGKEYKCKVSNKGLPSSIEKTISKAKGQPREPQVYTLPPSQEEMTKNQVSLTCLVKGFYPSDIAVEWESNGQPENNYKTTPPVLDSDGSFFLYSRLTVDKSRWQEGNVFSCSVMHEALHNHYTQKSLSLSLG

SEQ ID NO: 479 - protein, 448 aa, synthetic construct; identical to SEQ ID NO: 476
  REGION 1..448: note = F846C.2H3 heavy chain peptide sequence

SEQ ID NO: 480 - protein, 440 aa, synthetic construct
  REGION 1..440: note = F846TC.14A2 heavy chain peptide sequence
QIQLVQSGPELKKPGETVKISCKASGYTFTNYGMNWVKQAPGKGLKWMGWINTYTGEPTYAGDLKGRFAFSLETSASTAYLQINNLKNEDTATYFCVRYTMDYWGQGTSVTVSSASTKGPSVFPLAPCSRSTSESTAALGCLVKDYFPEPVTVSWNSGALTSGVHTFPAVLQSSGLYSLSSVVTVPSSSLGTKTYTCNVDHKPSNTKVDKRVESKYGPPCPPCPAPEFLGGPSVFLFPPKPKDTLMISRTPEVTCVVVDVSQEDPEVQFNWYVDGVEVHNAKTKPREEQFNSTYRVVSVLTVLHQDWLNGKEYKCKVSNKGLPSSIEKTISKAKGQPREPQVYTLPPSQEEMTKNQVSLTCLVKGFYPSDIAVEWESNGQPENNYKTTPPVLDSDGSFFLYSRLTVDKSRWQEGNVFSCSVMHEALHNHYTQKSLSLSLG

SEQ ID NO: 481 - protein, 450 aa, synthetic construct
  REGION 1..450: note = F846TC.14E4 heavy chain peptide sequence
QVTLKESGPGILQPSQTLSLTCSFSGFSLSTSGMGVGWIRQPSGKGLEWLAHIWWDDDKYYNTALKSGLTISKDASKNQVFLKIASMDTADTATYYCARNLYDGSYGYYAMDYWGQGTSVTVSSASTKGPSVFPLAPCSRSTSESTAALGCLVKDYFPEPVTVSWNSGALTSGVHTFPAVLQSSGLYSLSSVVTVPSSSLGTKTYTCNVDHKPSNTKVDKRVESKYGPPCPPCPAPEFLGGPSVFLFPPKPKDTLMISRTPEVTCVVVDVSQEDPEVQFNWYVDGVEVHNAKTKPREEQFNSTYRVVSVLTVLHQDWLNGKEYKCKVSNKGLPSSIEKTISKAKGQPREPQVYTLPPSQEEMTKNQVSLTCLVKGFYPSDIAVEWESNGQPENNYKTTPPVLDSDGSFFLYSRLTVDKSRWQEGNVFSCSVMHEALHNHYTQKSLSLSLG

SEQ ID NO: 482 - protein, 448 aa, synthetic construct
  REGION 1..448: note = F846TC.16B5 heavy chain peptide sequence
QIQLVQSGPELKKPGETVKISCKASGYTFTNYGMNWVKQAPGKGLKWMGWINTYTGEPAYADDFKGRFAFSLETSASTAYLQINNLKNEDMATYFCARWGGYDGDYYAMDYWGQGTSVTVSSASTKGPSVFPLAPCSRSTSESTAALGCLVKDYFPEPVTVSWNSGALTSGVHTFPAVLQSSGLYSLSSVVTVPSSSLGTKTYTCNVDHKPSNTKVDKRVESKYGPPCPPCPAPEFLGGPSVFLFPPKPKDTLMISRTPEVTCVVVDVSQEDPEVQFNWYVDGVEVHNAKTKPREEQFNSTYRVVSVLTVLHQDWLNGKEYKCKVSNKGLPSSIEKTISKAKGQPREPQVYTLPPSQEEMTKNQVSLTCLVKGFYPSDIAVEWESNGQPENNYKTTPPVLDSDGSFFLYSRLTVDKSRWQEGNVFSCSVMHEALHNHYTQKSLSLSLG

SEQ ID NO: 483 - protein, 449 aa, synthetic construct
  REGION 1..449: note = F846TC.7F10 heavy chain peptide sequence
EVQLVESGGDLVKPGGSLKLSCAASGFTFSNYGLSWIRQTPDKRLEWVATISSGGSYTYYPDSVKGRFTISRDSAKNTLYLQMSSLKSEDTAMYYCARHAHYYGVSPYYFDYWGQGTCLTVSSASTKGPSVFPLAPCSRSTSESTAALGCLVKDYFPEPVTVSWNSGALTSGVHTFPAVLQSSGLYSLSSVVTVPSSSLGTKTYTCNVDHKPSNTKVDKRVESKYGPPCPPCPAPEFLGGPSVFLFPPKPKDTLMISRTPEVTCVVVDVSQEDPEVQFNWYVDGVEVHNAKTKPREEQFNSTYRVVSVLTVLHQDWLNGKEYKCKVSNKGLPSSIEKTISKAKGQPREPQVYTLPPSQEEMTKNQVSLTCLVKGFYPSDIAVEWESNGQPENNYKTTPPVLDSDGSFFLYSRLTVDKSRWQEGNVFSCSVMHEALHNHYTQKSLSLSLG

SEQ ID NO: 484 - protein, 445 aa, synthetic construct
  REGION 1..445: note = F847C.10B9 heavy chain peptide sequence
QIQLVQSGPEVKKPGETVKISCKASGYIFTNYGMNWVKQAPGKGLKWMGWINTYTGEPTYTDDFKGRFAFSLETSASTAYLQINNLKNEDTATYFCAKFGNYVGAMDYWGQGTSVTVSSASTKGPSVFPLAPCSRSTSESTAALGCLVKDYFPEPVTVSWNSGALTSGVHTFPAVLQSSGLYSLSSVVTVPSSSLGTKTYTCNVDHKPSNTKVDKRVESKYGPPCPPCPAPEFLGGPSVFLFPPKPKDTLMISRTPEVTCVVVDVSQEDPEVQFNWYVDGVEVHNAKTKPREEQFNSTYRVVSVLTVLHQDWLNGKEYKCKVSNKGLPSSIEKTISKAKGQPREPQVYTLPPSQEEMTKNQVSLTCLVKGFYPSDIAVEWESNGQPENNYKTTPPVLDSDGSFFLYSRLTVDKSRWQEGNVFSCSVMHEALHNHYTQKSLSLSLG

SEQ ID NO: 485 - protein, 446 aa, synthetic construct
  REGION 1..446: note = F847C.11B1 heavy chain peptide sequence
EVQLQQSGPELVKPGASVKISCKASGNTFTDHNMHWVKQSHGKSLEWIGYIYPYNGGTGYNQKFKSKATLTVDNSSSTVYMELRSLTSEDSAVYYCARGEYDYLAWFAYWGQGTLVTVSAASTKGPSVFPLAPCSRSTSESTAALGCLVKDYFPEPVTVSWNSGALTSGVHTFPAVLQSSGLYSLSSVVTVPSSSLGTKTYTCNVDHKPSNTKVDKRVESKYGPPCPPCPAPEFLGGPSVFLFPPKPKDTLMISRTPEVTCVVVDVSQEDPEVQFNWYVDGVEVHNAKTKPREEQFNSTYRVVSVLTVLHQDWLNGKEYKCKVSNKGLPSSIEKTISKAKGQPREPQVYTLPPSQEEMTKNQVSLTCLVKGFYPSDIAVEWESNGQPENNYKTTPPVLDSDGSFFLYSRLTVDKSRWQEGNVFSCSVMHEALHNHYTQKSLSLSLG

SEQ ID NO: 486 - protein, 445 aa, synthetic construct
  REGION 1..445: note = F847C.12F12 heavy chain peptide sequence
QIQLVQSGPELKKPGETVKISCKASGYTFTNYGMNWVKQAPGKGLKWMGWINTYTGEPTYVDDFKGRFAFSLETSASTAYLRINNLKNEDTATYFCAKFGNYVGAMDYWGQGTSVTVSSASTKGPSVFPLAPCSRSTSESTAALGCLVKDYFPEPVTVSWNSGALTSGVHTFPAVLQSSGLYSLSSVVTVPSSSLGTKTYTCNVDHKPSNTKVDKRVESKYGPPCPPCPAPEFLGGPSVFLFPPKPKDTLMISRTPEVTCVVVDVSQEDPEVQFNWYVDGVEVHNAKTKPREEQFNSTYRVVSVLTVLHQDWLNGKEYKCKVSNKGLPSSIEKTISKAKGQPREPQVYTLPPSQEEMTKNQVSLTCLVKGFYPSDIAVEWESNGQPENNYKTTPPVLDSDGSFFLYSRLTVDKSRWQEGNVFSCSVMHEALHNHYTQKSLSLSLG

SEQ ID NO: 487 - protein, 445 aa, synthetic construct; identical to SEQ ID NO: 484
  REGION 1..445: note = F847C.26F5 heavy chain peptide sequence

SEQ ID NO: 488 - protein, 443 aa, synthetic construct
  REGION 1..443: note = F847C.4B10 heavy chain peptide sequence
EVQLVETGGGLVKPGGSLKLSCAASGFTFSSYAMSWVRQTPEKRLEWVASISSGGSTYYPDSVKGRFTISRDNARNILYLQMSSLRSEDTAMYYCTRFTTVVEMDYWGQGTSVTVSSASTKGPSVFPLAPCSRSTSESTAALGCLVKDYFPEPVTVSWNSGALTSGVHTFPAVLQSSGLYSLSSVVTVPSSSLGTKTYTCNVDHKPSNTKVDKRVESKYGPPCPPCPAPEFLGGPSVFLFPPKPKDTLMISRTPEVTCVVVDVSQEDPEVQFNWYVDGVEVHNAKTKPREEQFNSTYRVVSVLTVLHQDWLNGKEYKCKVSNKGLPSSIEKTISKAKGQPREPQVYTLPPSQEEMTKNQVSLTCLVKGFYPSDIAVEWESNGQPENNYKTTPPVLDSDGSFFLYSRLTVDKSRWQEGNVFSCSVMHEALHNHYTQKSLSLSLG

SEQ ID NO: 489 - protein, 438 aa, synthetic construct
  REGION 1..438: note = F849C.8D10 heavy chain peptide sequence
QVQLQQTGAELVKPGASVKLSCKASGYTFTSYWINWVKQRPGQGLEWIGNIYPGSSSIYYSEKFKSKATLTVDTSSSTAYMQLSSLTSDDSAVYYCARWGYWGQGTTLTVSSASTKGPSVFPLAPCSRSTSESTAALGCLVKDYFPEPVTVSWNSGALTSGVHTFPAVLQSSGLYSLSSVVTVPSSSLGTKTYTCNVDHKPSNTKVDKRVESKYGPPCPPCPAPEFLGGPSVFLFPPKPKDTLMISRTPEVTCVVVDVSQEDPEVQFNWYVDGVEVHNAKTKPREEQFNSTYRVVSVLTVLHQDWLNGKEYKCKVSNKGLPSSIEKTISKAKGQPREPQVYTLPPSQEEMTKNQVSLTCLVKGFYPSDIAVEWESNGQPENNYKTTPPVLDSDGSFFLYSRLTVDKSRWQEGNVFSCSVMHEALHNHYTQKSLSLSLG

SEQ ID NO: 490 - protein, 447 aa, synthetic construct
  REGION 1..447: note = F849C.8H3 heavy chain peptide sequence
QVTLKESGPGILQPSQTLSLTCSFSGFSLSTFGMGVGWIRQPSGKGLEWLAHIWWDDDKHYNPALKSRLTISKDTSKNQVFLRIANVDTADNATYYCARIDYGDYVGFAYWGQGTLVTVSAASTKGPSVFPLAPCSRSTSESTAALGCLVKDYFPEPVTVSWNSGALTSGVHTFPAVLQSSGLYSLSSVVTVPSSSLGTKTYTCNVDHKPSNTKVDKRVESKYGPPCPPCPAPEFLGGPSVFLFPPKPKDTLMISRTPEVTCVVVDVSQEDPEVQFNWYVDGVEVHNAKTKPREEQFNSTYRVVSVLTVLHQDWLNGKEYKCKVSNKGLPSSIEKTISKAKGQPREPQVYTLPPSQEEMTKNQVSLTCLVKGFYPSDIAVEWESNGQPENNYKTTPPVLDSDGSFFLYSRLTVDKSRWQEGNVFSCSVMHEALHNHYTQKSLSLSLG

SEQ ID NO: 491 - protein, 444 aa, synthetic construct
  REGION 1..444: note = 846.2B11 heavy chain peptide sequence
QVQLQQSGPELVRPGALVKISCKASGYTFTSYDINWVKQRPGQGLEWIGWIYPGDGSTKYNEKFKGKATLTADKSSSTAYMQLSSLTSENSAVYFCAREAASNAMDYWGQGTSVTVSSASTKGPSVFPLAPCSRSTSESTAALGCLVKDYFPEPVTVSWNSGALTSGVHTFPAVLQSSGLYSLSSVVTVPSSSLGTKTYTCNVDHKPSNTKVDKRVESKYGPPCPPCPAPEFLGGPSVFLFPPKPKDTLMISRTPEVTCVVVDVSQEDPEVQFNWYVDGVEVHNAKTKPREEQFNSTYRVVSVLTVLHQDWLNGKEYKCKVSNKGLPSSIEKTISKAKGQPREPQVYTLPPSQEEMTKNQVSLTCLVKGFYPSDIAVEWESNGQPENNYKTTPPVLDSDGSFFLYSRLTVDKSRWQEGNVFSCSVMHEALHNHYTQKSLSLSLG

SEQ ID NO: 492 - protein, 448 aa, synthetic construct
  REGION 1..448: note = 846.4D5 heavy chain peptide sequence
EVKLEESGGGLVQPGGSMKLSCVASGFTFSNYWMNWVRQSPEKGLEWVAEIRLKSNNYATHYAESVKGRFTISRDDSKSSVYLQMNNLRAEDTGIYYCTRHYGFPYWYFDVWGAGTTVTVSSASTKGPSVFPLAPCSRSTSESTAALGCLVKDYFPEPVTVSWNSGALTSGVHTFPAVLQSSGLYSLSSVVTVPSSSLGTKTYTCNVDHKPSNTKVDKRVESKYGPPCPPCPAPEFLGGPSVFLFPPKPKDTLMISRTPEVTCVVVDVSQEDPEVQFNWYVDGVEVHNAKTKPREEQFNSTYRVVSVLTVLHQDWLNGKEYKCKVSNKGLPSSIEKTISKAKGQPREPQVYTLPPSQEEMTKNQVSLTCLVKGFYPSDIAVEWESNGQPENNYKTTPPVLDSDGSFFLYSRLTVDKSRWQEGNVFSCSVMHEALHNHYTQKSLSLSLG

SEQ ID NO: 493 - protein, 444 aa, synthetic construct
  REGION 1..444: note = 846T.1H2 heavy chain peptide sequence
QIQLVQSGPELKKPGETVKISCKASGYTFTNYGMNWVKQAPGKGLKWMGWINTNTGEPTYAEEFKGRFAFSLETSASTAYLQINNLKNEDTATYFCATGGGNWDFDYWGQGTTLTVSSASTKGPSVFPLAPCSRSTSESTAALGCLVKDYFPEPVTVSWNSGALTSGVHTFPAVLQSSGLYSLSSVVTVPSSSLGTKTYTCNVDHKPSNTKVDKRVESKYGPPCPPCPAPEFLGGPSVFLFPPKPKDTLMISRTPEVTCVVVDVSQEDPEVQFNWYVDGVEVHNAKTKPREEQFNSTYRVVSVLTVLHQDWLNGKEYKCKVSNKGLPSSIEKTISKAKGQPREPQVYTLPPSQEEMTKNQVSLTCLVKGFYPSDIAVEWESNGQPENNYKTTPPVLDSDGSFFLYSRLTVDKSRWQEGNVFSCSVMHEALHNHYTQKSLSLSLG

SEQ ID NO: 494 - protein, 440 aa, synthetic construct
  REGION 1..440: note = 847.14H4 heavy chain peptide sequence
QIQLVQSGPELTKPGETVKISCKASGYTFTDYGMNWVRQAPGETLKWMGWINTYTGEPTYADDFKGRFAFSLESSASTAYLQINNLKNEDVATYFCARYPMDYWGQGTSVTVSSASTKGPSVFPLAPCSRSTSESTAALGCLVKDYFPEPVTVSWNSGALTSGVHTFPAVLQSSGLYSLSSVVTVPSSSLGTKTYTCNVDHKPSNTKVDKRVESKYGPPCPPCPAPEFLGGPSVFLFPPKPKDTLMISRTPEVTCVVVDVSQEDPEVQFNWYVDGVEVHNAKTKPREEQFNSTYRVVSVLTVLHQDWLNGKEYKCKVSNKGLPSSIEKTISKAKGQPREPQVYTLPPSQEEMTKNQVSLTCLVKGFYPSDIAVEWESNGQPENNYKTTPPVLDSDGSFFLYSRLTVDKSRWQEGNVFSCSVMHEALHNHYTQKSLSLSLG

SEQ ID NO: 495 - protein, 219 aa, synthetic construct
  REGION 1..219: note = TB001 light chain peptide sequence
DIVLTQSPLSLPVTPGEPASISCRSSKSLLYKDGKTYLNWFLQKPGQSPQLLIYLMSTHASGVPDRFSGSGSGTDFTLKISRVEAEDVGVYYCQQLVDYPLTFGGGTKLEIKRTVAAPSVFIFPPSDEQLKSGTASVVCLLNNFYPREAKVQWKVDNALQSGNSQESVTEQDSKDSTYSLSSTLTLSKADYEKHKVYACEVTHQGLSSPVTKSFNRGEC

SEQ ID NO: 496 - protein, 219 aa, synthetic construct
  REGION 1..219: note = TB006 light chain peptide sequence
DIVMTQTPLSLSVTPGQPASISCKSSKSLLHSDGITYLYWYLQKPGQSPQLLIYRMSNLASGVPDRFSGSGSGTDFTLKISRVEAEDVGVYYCAQMLEFPLTFGQGTKLEIKRTVAAPSVFIFPPSDEQLKSGTASVVCLLNNFYPREAKVQWKVDNALQSGNSQESVTEQDSKDSTYSLSSTLTLSKADYEKHKVYACEVTHQGLSSPVTKSFNRGEC

SEQ ID NO: 497 - protein, 214 aa, synthetic construct
  REGION 1..214: note = 12G5.D7 light chain peptide sequence
DILMTQSPSSMSVSLGDTVSITCHASQGINSNMGWLQQKPGKSFKGLIYHATNLEDGVPSRFSGSGSGADYSLTISSLESEDFADYYCVQYAQFPPTFGSGTKLEIKRADVAPTVSIFPPSSEQLTSGGASVVCFLNNFYPKDINVKWKIDGSERQNGVLNSWTDQDSKDSTYSMSSTLTLTKDEYERHNSYTCEATHKTSTSPIVKSFNRNEC

SEQ ID NO: 498 - protein, 219 aa, synthetic construct
  REGION 1..219: note = 13A12.2E5 light chain peptide sequence
DVVMTQTPLTLSVAIGQPASISCKSSQSLLYTNGKTYLNWLLQRPGQSPKRLIYLLSKLDSGVPDRFSASGSGTDFTLKISRVEAEDLGVYYCLQSTHFPLTFGAGTKLEMKRADVAPTVSIFPPSSEQLTSGGASVVCFLNNFYPKDINVKWKIDGSERQNGVLNSWTDQDSKDSTYSMSSTLTLTKDEYERHNSYTCEATHKTSTSPIVKSFNRNEC

SEQ ID NO: 499 - protein, 219 aa, synthetic construct
  REGION 1..219: note = 14H10.2C9 light chain peptide sequence
DVVMTQTPLTLSVTIGQPASISCKSSQSLFDSDGKTYLNWLLQRPGQSPKRLIYLVSKLDSGVPDRFTGSGSGTDFTLKISRVEAEDLGVYYCWQGTHFPLTFGAGTKLEMKRADVAPTVSIFPPSSEQLTSGGASVVCFLNNFYPKDINVKWKIDGSERQNGVLNSWTDQDSKDSTYSMSSTLTLTKDEYERHNSYTCEATHKTSTSPIVKSFNRNEC

SEQ ID NO: 500 - protein, 219 aa, synthetic construct
  REGION 1..219: note = 15F10.2D6 light chain peptide sequence
DVLMTQTPLSLPVSLGDQASISCRSSQSIVHNNGNTYLEWYLQKPGQSPKLLIYKVSNRFSGVPDRFSGSGSGTDFTLKISRVEAEDLGVYYCFQGSHVPLTFGGGTKLELKRADVAPTVSIFPPSSEQLTSGGASVVCFLNNFYPKDINVKWKIDGSERQNGVLNSWTDQDSKDSTYSMSSTLTLTKDEYERHNSYTCEATHKTSTSPIVKSFNRNEC

SEQ ID NO: 501 - protein, 214 aa, synthetic construct
  REGION 1..214: note = 19B5.2E6/23H9.2E4 light chain peptide sequence
DIQMTQTTSSLSASLGDRVTISCSASQGINNYLNWYQQKPDGTVKLLIYYASSLHSGVPSRFSGSGSGTDYSLTISNLEPEDIATYYCQQYSQVPYTFGSGTKLEIKRADVAPTVSIFPPSSEQLTSGGASVVCFLNNFYPKDINVKWKIDGSERQNGVLNSWTDQDSKDSTYSMSSTLTLTKDEYERHNSYTCEATHKTSTSPIVKSFNRNEC

SEQ ID NO: 502 - protein, 214 aa, synthetic construct
  REGION 1..214: note = 20D11.2C6 light chain peptide sequence
DIQMNQSPSSLSASLGDTITITCRASQNIYIWLSWYQQKPGNIPKLLIYKASNLHTGVPSRFSGSGSGTDFTLTISTLQPEDIATYFCLQGQSYPLTFGAGTKLEMKRADVAPTVSIFPPSSEQLTSGGASVVCFLNNFYPKDINVKWKIDGSERQNGVLNSWTDQDSKDSTYSMSSTLTLTKDEYERHNSYTCEATHKTSTSPIVKSFNRNEC

SEQ ID NO: 503 - protein, 214 aa, synthetic construct
  REGION 1..214: note = 20H5.A3 light chain peptide sequence
DIQMTQTTSSLSASLGDRVTINCSASQDISNYLNWYQQKPDGTVKLLIYYTSSLLSGVPSRFSGSGSGTDYSLTISNLEPEDIATYFCQQYSKLPYTFGSGTHLEIKRADVAPTVSIFPPSSEQLTSGGASVVCFLNNFYPKDINVKWKIDGSERQNGVLNSWTDQDSKDSTYSMSSTLTLTKDEYERHNSYTCEATHKTSTSPIVKSFNRNEC

SEQ ID NO: 504 - protein, 219 aa, synthetic construct
  REGION 1..219: note = 2D10.2B2 light chain peptide sequence
DIVMTQAAFSNPVTLGTSASISCRSSKSLLHSDGITYLYWYLQRPGQSPQLLIYRMSNLASGVPDRFSGSGSGTDFTLRISRVEAEDVGVYYCAQMIEFPLTFGAGTILELKRADVAPTVSIFPPSSEQLTSGGASVVCFLNNFYPKDINVKWKIDGSERQNGVLNSWTDQDSKDSTYSMSSTLTLTKDEYERHNSYTCEATHKTSTSPIVKSFNRNEC

SEQ ID NO: 505 - protein, 219 aa, synthetic construct
  REGION 1..219: note = 3B11.2G2 light chain peptide sequence
DVVMTQTPLTLSVAIGQPASISCKSSQSLLYTNGKTYLNWLLQRPGQSPKRLIYLVSKLDSGVPDRFSGSGSGTDFTLKISRVEAEDLGVYYCLQSTHFPLTFGAGTKLELKRADVAPTVSIFPPSSEQLTSGGASVVCFLNNFYPKDINVKWKIDGSERQNGVLNSWTDQDSKDSTYSMSSTLTLTKDEYERHNSYTCEATHKTSTSPIVKSFNRNEC

SEQ ID NO: 506 - protein, 219 aa, synthetic construct
  REGION 1..219: note = 7D8.2D8 light chain peptide sequence
DVLMTQTPLSLPVSLGDQASISCRSSQSIVHSNGNTYLEWYLQKPGQSPKLLIYKVSNRFSGVPDRFSGSGSGTDFTLKISRVEAEDLGVYYCFQGSHVPLTFGAGTKLELKRADVAPTVSIFPPSSEQLTSGGASVVCFLNNFYPKDINVKWKIDGSERQNGVLNSWTDQDSKDSTYSMSSTLTLTKDEYERHNSYTCEATHKTSTSPIVKSFNRNEC

SEQ ID NO: 507 - protein, 219 aa, synthetic construct
  REGION 1..219: note = mTB001 light chain peptide sequence
DIVITQDELSNPVTSGESVSISCRSSKSLLYKDGKTYLNWFLQRPGQSPQLLIYLMSTHASGVSDRFSGSGSGTDFTLEISRVKAEDVGVYYCQQLVDYPLTFGAGTKLELKRADVAPTVSIFPPSSEQLTSGGASVVCFLNNFYPKDINVKWKIDGSERQNGVLNSWTDQDSKDSTYSMSSTLTLTKDEYERHNSYTCEATHKTSTSPIVKSFNRNEC

SEQ ID NO: 508 - protein, 219 aa, synthetic construct
  REGION 1..219: note = 4A11.2B5 light chain peptide sequence
DIVMTQAAFSNPVTLGTSASISCRSSKSLLHSDGITYLYWYLQRPGQSPQLLIYRMSNLASGVPDRFSGSGSGTDFTLRISRVEAEDVGVYYCAQMLEFPLTFGAGTKLELKRTVAAPSVFIFPPSDEQLKSGTASVVCLLNNFYPREAKVQWKVDNALQSGNSQESVTEQDSKDSTYSLSSTLTLSKADYEKHKVYACEVTHQGLSSPVTKSFNRGEC

SEQ ID NO: 509 - protein, 219 aa, synthetic construct; identical to SEQ ID NO: 496
  REGION 1..219: note = 4A11.H1L1 light chain peptide sequence

SEQ ID NO: 510 - protein, 219 aa, synthetic construct
  REGION 1..219: note = 4A11.H4L2 light chain peptide sequence
DIVMTQSPLSLPVTPGEPASISCRSSKSLLHSDGITYLYWYLQKPGQSPQLLIYRMSNLASGVPDRFSGSGSGTDFTLKISRVEAEDVGVYYCAQMLEFPLTFGQGTKLEIKRTVAAPSVFIFPPSDEQLKSGTASVVCLLNNFYPREAKVQWKVDNALQSGNSQESVTEQDSKDSTYSLSSTLTLSKADYEKHKVYACEVTHQGLSSPVTKSFNRGEC

SEQ ID NO: 511 - protein, 219 aa, synthetic construct
  REGION 1..219: note = 4G2.2G6 light chain peptide sequence
DVVMTQTPLTLSVTIGQPASISCKSSQSLLYTDGKTYLSWFLQRPGQSPKRLIYLVSKLDSGVPDRFSGSGSGTDFTLKISRVEAEDLGVYYCLQSTHFPLTFGAGTKLEVKRTVAAPSVFIFPPSDEQLKSGTASVVCLLNNFYPREAKVQWKVDNALQSGNSQESVTEQDSKDSTYSLSSTLTLSKADYEKHKVYACEVTHQGLSSPVTKSFNRGEC

SEQ ID NO: 512 - protein, 214 aa, synthetic construct
  REGION 1..214: note = 6B3.2D3 light chain peptide sequence
SIVMTQTPKFLLVSAGDRVTITCKASQSVSNDVAWYQQKPGQSPKLLIYYASNRYTGVPDRFTGSGYGTDFTFTISTVQAEDLAVYFCQQDYTSPYTFGGGTKLEIKRTVAAPSVFIFPPSDEQLKSGTASVVCLLNNFYPREAKVQWKVDNALQSGNSQESVTEQDSKDSTYSLSSTLTLSKADYEKHKVYACEVTHQGLSSPVTKSFNRGEC

SEQ ID NO: 513 - protein, 214 aa, synthetic construct
  REGION 1..214: note = 6H6.2D6 light chain peptide sequence
DIQMTQTTSSLSASLGDRVTISCSASQGISNYLNWYQQKPDGTVKLLIYYTSSLHSGVPSRFSGSGSGTDYSLTISNLEPEDIATYYCQQYSELPYTFGSGTKLEIKRTVAAPSVFIFPPSDEQLKSGTASVVCLLNNFYPREAKVQWKVDNALQSGNSQESVTEQDSKDSTYSLSSTLTLSKADYEKHKVYACEVTHQGLSSPVTKSFNRGEC

SEQ ID NO: 514 - protein, 214 aa, synthetic construct
  REGION 1..214: note = 9H2.2H10 light chain peptide sequence
DIVMTQSHKFMSTSVGDRVSITCKASQDVSTAVAWYQQKPGQSPKLLIYWASTRHTGVPDRFTGSGSGTDYTLTISSVQAEDLALYYCQQHYTTPLTFGAGTKLELKRTVAAPSVFIFPPSDEQLKSGTASVVCLLNNFYPREAKVQWKVDNALQSGNSQESVTEQDSKDSTYSLSSTLTLSKADYEKHKVYACEVTHQGLSSPVTKSFNRGEC

SEQ ID NO: 515 - protein, 214 aa, synthetic construct
  REGION 1..214: note = 13G4.2F8 light chain peptide sequence
DIVMTQSQKFMSTSVGERVSITCKASQNVGTNVAWYQQKAGQSLELLIYGASNRHTGVPDRFTGSGSGTDFTLTITNVQSEDMTNYFCEQYSNFPLTFGAGTKLELKRTVAAPSVFIFPPSDEQLKSGTASVVCLLNNFYPREAKVQWKVDNALQSGNSQESVTEQDSKDSTYSLSSTLTLSKADYEKHKVYACEVTHQGLSSPVTKSFNRGEC

SEQ ID NO: 516 - protein, 219 aa, synthetic construct
  REGION 1..219: note = 13H12.2F8 light chain peptide sequence
DVVMTQTPLTLSVTIGQPASISCKSSQSLFHSDGKTYLNWLLQRPGQSPKRLIYLVSKLDSGVPDRFTGSGSGTDFTPKISRVEDEDLGVYYCWQGTHFPLTFGAGTKLEMKRTVAAPSVFIFPPSDEQLKSGTASVVCLLNNFYPREAKVQWKVDNALQSGNSQESVTEQDSKDSTYSLSSTLTLSKADYEKHKVYACEVTHQGLSSPVTKSFNRGEC

SEQ ID NO: 517 - protein, 214 aa, synthetic construct
  REGION 1..214: note = 15G7.2A7 light chain peptide sequence
DIQMNQSPSSLSASLGDTISITCRASQNINIWLSWYQQKPGNIPQLLIYKASNLHTGVPSRFSGSGSGTDFTLTISSLQPEDIATYYCLQGQSYPLTFGAGTKLVMKRTVAAPSVFIFPPSDEQLKSGTASVVCLLNNFYPREAKVQWKVDNALQSGNSQESVTEQDSKDSTYSLSSTLTLSKADYEKHKVYACEVTHQGLSSPVTKSFNRGEC

SEQ ID NO: 518 - protein, 217 aa, synthetic construct
  REGION 1..217: note = 19D9.2E5 light chain peptide sequence
DVVMTQTPLTLSVTIGQPASISCKSSQSLLHSDGKTYLNWLLQRPGQPPKRLMYLVSTLDSGVPDRFTGSGSGTDFTLKISRVEAEDLGVYYCWQGTHFPLTFGAGTKPERTVAAPSVFIFPPSDEQLKSGTASVVCLLNNFYPREAKVQWKVDNALQSGNSQESVTEQDSKDSTYSLSSTLTLSKADYEKHKVYACEVTHQGLSSPVTKSFNRGEC

SEQ ID NO: 519 - protein, 217 aa, synthetic construct
  REGION 1..217: note = 23B10.2B12 light chain peptide sequence
DIVMTQAAFSNPVTLGTSASISCRSSKSLLHSDGITYFYWYLQRPGQSPQLLIYRMSNLASGVPDRFSGSGSGTDFTLRISRVEAEDVGVYYCAQMLEFPLTFGAGTKLERTVAAPSVFIFPPSDEQLKSGTASVVCLLNNFYPREAKVQWKVDNALQSGNSQESVTEQDSKDSTYSLSSTLTLSKADYEKHKVYACEVTHQGLSSPVTKSFNRGEC

SEQ ID NO: 520 - protein, 214 aa, synthetic construct
  REGION 1..214: note = 24D12.2H9 light chain peptide sequence
DIVMTQSHKFMSTSVGDRVSITCKASQDVRTAVAWYQQKPGQSPKLLIYWASTRHTGVPDRFTGSGSGTDFTLTLSNVQSEDLADYFCQQYSSYPWTFGGGTKLEIKRTVAAPSVFIFPPSDEQLKSGTASVVCLLNNFYPREAKVQWKVDNALQSGNSQESVTEQDSKDSTYSLSSTLTLSKADYEKHKVYACEVTHQGLSSPVTKSFNRGEC

SEQ ID NO: 521 - protein, 219 aa, synthetic construct
  REGION 1..219: note = F846C.1B2 light chain peptide sequence
NIWLTQSPSSLAVSAGEMVTMTCKSSQSVLYSSNQKNYLAWYQQKPGQSPKLLIYWASTRESGVPDRFTGSGSGTDFSLTISSVQAEDLAVYYCHQYLSSLTFGAGTKLELKRTVAAPSVFIFPPSDEQLKSGTASVVCLLNNFYPREAKVQWKVDNALQSGNSQESVTEQDSKDSTYSLSSTLTLSKADYEKHKVYACEVTHQGLSSPVTKSFNRGEC

SEQ ID NO: 522 - protein, 219 aa, synthetic construct
  REGION 1..219: note = F846C.1F5/F846C.2H3 light chain peptide sequence
NIMMTQSPSSLAVSAGEKVTMSCKSSQSVLYSSNQKNYLAWYQQKPGQSPKLLIYWASTRESGVPDRFTGSGSGTDFTLTISSVQPEDLAVYYCHQYLSSLTFGAGTKLELKRTVAAPSVFIFPPSDEQLKSGTASVVCLLNNFYPREAKVQWKVDNALQSGNSQESVTEQDSKDSTYSLSSTLTLSKADYEKHKVYACEVTHQGLSSPVTKSFNRGEC

SEQ ID NO: 523 - protein, 219 aa, synthetic construct
  REGION 1..219: note = F846C.1H12 light chain peptide sequence
NIMMTQSPSSLAVSAGQKVTMSCKSSQSVLYSSSQKNYLAWYQQKPGQSPKLLIYWASTRESGVPDRFSGSGSGTDFTLTISSVQPEDLAVYYCHQYLSSLTFGAGTKLELKRTVAAPSVFIFPPSDEQLKSGTASVVCLLNNFYPREAKVQWKVDNALQSGNSQESVTEQDSKDSTYSLSSTLTLSKADYEKHKVYACEVTHQGLSSPVTKSFNRGEC

SEQ ID NO: 524 - protein, 219 aa, synthetic construct
  REGION 1..219: note = F846C.1H5 light chain peptide sequence
DVVMTQTPLSLPVSLGDQASISCRSSQSLVHNSGNTYLHWYLQRPGQSPNLLIYKVSNRFSGVPDRFSGSGSGTDFTLKISRVAAEDLGVYFCSQSTHVPPTFGGGTKLEIKRTVAAPSVFIFPPSDEQLKSGTASVVCLLNNFYPREAKVQWKVDNALQSGNSQESVTEQDSKDSTYSLSSTLTLSKADYEKHKVYACEVTHQGLSSPVTKSFNRGEC

SEQ ID NO: 525 - protein, 216 aa, synthetic construct
  REGION 1..216: note = F846TC.14A2 light chain peptide sequence
QAVVTQESALTTSPGETVTLTCRSSTGAVTTSNYANWVQEKPDHLFTGLIGGINNRVPGVPARFSGSLIGDKAALTITGAQTEDEAIYFCALWYSNHWVFGGGTKLTVLRTVAAPSVFIFPPSDEQLKSGTASVVCLLNNFYPREAKVQWKVDNALQSGNSQESVTEQDSKDSTYSLSSTLTLSKADYEKHKVYACEVTHQGLSSPVTKSFNRGEC

SEQ ID NO: 526 - protein, 219 aa, synthetic construct
  REGION 1..219: note = F846TC.14E4 light chain peptide sequence
DIVMTQAAFSNPVTLGTSASISCRSSKSLLHTNGITFLYWYLQKPGQSPQPLIYQMSNLASGVPDRFSSSGSGTDFTLRISRVEAEDVGVYYCAQNLELPWTFGGGTKLEINRTVAAPSVFIFPPSDEQLKSGTASVVCLLNNFYPREAKVQWKVDNALQSGNSQESVTEQDSKDSTYSLSSTLTLSKADYEKHKVYACEVTHQGLSSPVTKSFNRGEC

SEQ ID NO: 527 - protein, 219 aa, synthetic construct
  REGION 1..219: note = F846TC.16B5 light chain peptide sequence
NIMMTQSPSSLAVSAGEKVTMSCKSSQSVLYSSNQKNYLAWYQQKPGQSPKLLIYWASTRESGVPDRFTGSGSGTDFTLTISSVQAEDLAVYYCHQYLSSLTFGAGTKLELKRTVAAPSVFIFPPSDEQLKSGTASVVCLLNNFYPREAKVQWKVDNALQSGNSQESVTEQDSKDSTYSLSSTLTLSKADYEKHKVYACEVTHQGLSSPVTKSFNRGEC

SEQ ID NO: 528 - protein, 220 aa, synthetic construct
  REGION 1..220: note = F846TC.7F10 light chain peptide sequence
DIVMTQSPSSLAMSVGQKVTMSCKSSQSLLNSSNQKNYLAWYQQKPGQSPKLLVYFASTRESGVPDRFIGSGSGTDFTLTISSVQAEDLADYFCQQHYSTPYTFGGGAKLEIKRTVAAPSVFIFPPSDEQLKSGTASVVCLLNNFYPREAKVQWKVDNALQSGNSQESVTEQDSKDSTYSLSSTLTLSKADYEKHKVYACEVTHQGLSSPVTKSFNRGEC

SEQ ID NO: 529 - protein, 214 aa, synthetic construct
  REGION 1..214: note = F847C.10B9 light chain peptide sequence
DIRMTQSPSSLSASLGDTITITCHASQNINVWLSWYQQKPGNIPKLLIYKASNLHTGVPSRFSGSGSGTGFTLTISSLQPEDIATYYCQQGQSYPYTFGGGTKLELKRTVAAPSVFIFPPSDEQLKSGTASVVCLLNNFYPREAKVQWKVDNALQSGNSQESVTEQDSKDSTYSLSSTLTLSKADYEKHKVYACEVTHQGLSSPVTKSFNRGEC

SEQ ID NO: 530 - protein, 214 aa, synthetic construct
  REGION 1..214: note = F847C.11B1 light chain peptide sequence
EIVLTQSPASLSVTTGEKVTIRCITSIDIDDDMNWYQQKPGEPPKLLISEGNTLRPGVPSRFSSSGYGTDFVFTIENTLSEDVADYYCLQSDNKPLTFGAGTKLELKRTVAAPSVFIFPPSDEQLKSGTASVVCLLNNFYPREAKVQWKVDNALQSGNSQESVTEQDSKDSTYSLSSTLTLSKADYEKHKVYACEVTHQGLSSPVTKSFNRGEC

SEQ ID NO: 531 - protein, 214 aa, synthetic construct
  REGION 1..214: note = F847C.12F12 light chain peptide sequence
DIQVIQSPSSLSASLGDTITITCHASQNINVWLSWYQQKPGNIPKLLIYKASNLHTGVPSRFSGSGSGTGFTLTISSLQPEDIATYYCQQGQSYPYTFGGGTKLELKRTVAAPSVFIFPPSDEQLKSGTASVVCLLNNFYPREAKVQWKVDNALQSGNSQESVTEQDSKDSTYSLSSTLTLSKADYEKHKVYACEVTHQGLSSPVTKSFNRGEC

SEQ ID NO: 532 - protein, 214 aa, synthetic construct
  REGION 1..214: note = F847C.26F5 light chain peptide sequence
EIKMNQSPSSLSASLGDTITITCHASQNINVWLSWYQQKPGNIPKLLIYKASNLHTGVPSRFSGSGSGTGFTLTISSLQPEDIATYYCQQGQSYPYTFGGGTKLELKRTVAAPSVFIFPPSDEQLKSGTASVVCLLNNFYPREAKVQWKVDNALQSGNSQESVTEQDSKDSTYSLSSTLTLSKADYEKHKVYACEVTHQGLSSPVTKSFNRGEC

SEQ ID NO: 533 - protein, 216 aa, synthetic construct
  REGION 1..216: note = F847C.4B10/847.14H4 light chain peptide sequence
QAVVTQESALTTSPGETVTLTCRSSTGAVTTSNYANWVQEKPDHLFTGLIGGTNNRAPGVPARFSGSLIGDKAALTITGAQTEDEAIYFCALWYSNHLVFGGGTKLTVLRTVAAPSVFIFPPSDEQLKSGTASVVCLLNNFYPREAKVQWKVDNALQSGNSQESVTEQDSKDSTYSLSSTLTLSKADYEKHKVYACEVTHQGLSSPVTKSFNRGEC

SEQ ID NO: 534 - protein, 219 aa, synthetic construct
  REGION 1..219: note = F849C.8D10 light chain peptide sequence
DVLMTQTPLSLPVSLGDQASISCRSSQDIVHSSGNTYLEWYLQKPGQSLKLLIYKVSNRFSGVPDRFSASGSGTDFTLKISRVEAEDLGVYYCFQGSHVPPTFGSGTKLEIKRTVAAPSVFIFPPSDEQLKSGTASVVCLLNNFYPREAKVQWKVDNALQSGNSQESVTEQDSKDSTYSLSSTLTLSKADYEKHKVYACEVTHQGLSSPVTKSFNRGEC

SEQ ID NO: 535 - protein, 219 aa, synthetic construct
  REGION 1..219: note = F849C.8H3 light chain peptide sequence
DIGMRQAAFSNPVTLGTSASISCRSSKSLLYSNGITYLYWFLQKPGQSPQLLIYQMSNLASGVPDRFSSSGSGTDFTLRISRVEADDVGVYYCAQNLELPWTFGGGTKLEIKRTVAAPSVFIFPPSDEQLKSGTASVVCLLNNFYPREAKVQWKVDNALQSGNSQESVTEQDSKDSTYSLSSTLTLSKADYEKHKVYACEVTHQGLSSPVTKSFNRGEC

SEQ ID NO: 536 - protein, 218 aa, synthetic construct
  REGION 1..218: note = 846.2B11 light chain peptide sequence
DIVLTQSPASLGVSLGQRATISCRASKSVSTSGYSYMHWYQQKPGQPPKLLIYLASILESGVPARFSGSGSGTDFTLNIHPVEEEDAAIYYCQHSRELPLTFGAGTKLELKRTVAAPSVFIFPPSDEQLKSGTASVVCLLNNFYPREAKVQWKVDNALQSGNSQESVTEQDSKDSTYSLSSTLTLSKADYEKHKVYACEVTHQGLSSPVTKSFNRGEC

SEQ ID NO: 537 - protein, 218 aa, synthetic construct
  REGION 1..218: note = 846.4D5 light chain peptide sequence
NIVLTQSPASLAVSLGQRATISCRASESVDSYGNSFMHWYQQKPGQPPKLLIYLASNLESGVPARFSGSGSRTDFTLTIDPVEADDAATYYCQQNNEDPWTFGGGTKLEIKRTVAAPSVFIFPPSDEQLKSGTASVVCLLNNFYPREAKVQWKVDNALQSGNSQESVTEQDSKDSTYSLSSTLTLSKADYEKHKVYACEVTHQGLSSPVTKSFNRGEC

SEQ ID NO: 538 - protein, 219 aa, synthetic construct
  REGION 1..219: note = 846T.1H2 light chain peptide sequence
DVVMTQTPLTLSVTIGQPASISCKSSQSLLYSNGKTYLNWLLQRPGQSPKRLIYLVSKLDSGVPDRFTGSGSGTDFTLKISRVEAEDLGVYYCVQGTHFPQTFGGGTKLEIKRTVAAPSVFIFPPSDEQLKSGTASVVCLLNNFYPREAKVQWKVDNALQSGNSQESVTEQDSKDSTYSLSSTLTLSKADYEKHKVYACEVTHQGLSSPVTKSFNRGEC

SEQ ID NO: 539 - DNA, 348 bp, synthetic construct
  misc_feature 1..348: note = TB001 VH DNA sequence
  source 1..348: mol_type = other DNA
caggtgcagctggtgcagtccggctccgagctgaaaaaacccggcgcctccgtgaaagtgtcctgcaaagcctccggctacacattcacaaactacggcatgaactgggtgaggcaggcccccggccagggcctgaaatggatgggctggatcaacacaaacacaggcgagcccacatacgtggaggagttcacaggcaggttcgtgttctccctggagacatccgtgtccacagcctacctgcagatctcctccctgaaagccgaggacacagccgtgtacttctgcgccccctacgacaacttcttcgcctactggggccagggcacaacagtgacagtgtcctcc

SEQ ID NO: 540 - DNA, 357 bp, synthetic construct
  misc_feature 1..357: note = TB006VH DNA sequence
  source 1..357: mol_type = other DNA
cagattcaattggttcagagcggctcagaactgaaaaagcctggagccagcgttaaagtgagctgtaaagccagtggatacacattcaccacttacgtcatgtcctgggttagacaggcccctggacaggggctggaatggatgggctggataaacactcactctggagtgcccacatacgccgacgactttacaggcaggttcgtgttttccctagatactagtgtgaatactgcatacttgcaaatctcttctctgaaagcagaggataccgccgtgtacttttgcacccgcgatgggaatgatggggatgccatggacaactggggccaggggacgactgtgacagtgtcttca

SEQ ID NO: 541 - DNA, 366 bp, synthetic construct
  misc_feature 1..366: note = 12G5.D7 VH DNA sequence
  source 1..366: mol_type = other DNA
caggtgcagctgaagcagtctggggctgagctggtgaggcctggggcttcagtgaagctgtcctgcaaggcttctggctacactttcactgactactatataaactgggtgaagcagaggcctggacagggacttgagtggattgcaaggatttatcctggaactggtaatactgactacaatgagaagttcaagggcagggccacactgactgcagaaaactcctccagcactgcctacatgcagctcagcagtctgacatctgaggactctgctgtctatttctgtgcaagatttgcgtattactacggtagtggagggtactttgactactggggccacggcaccactctcacagtctcctca

SEQ ID NO: 542 - DNA, 357 bp, synthetic construct
  misc_feature 1..357: note = 13A12.2E5 VH DNA sequence
  source 1..357: mol_type = other DNA
cagatccagttggtacagtctggacctgagctgaagaagcctggagagacagtcaagatctcctgcaagacttctgggtataaattcaaaacctatgtgatgagctgggtgaaacaggctccaggaaaggctttaaagtggatgggctggataaacacctactctggagtgccaacatatgctgatgacttcaagggacgatttgccttctctttggaaacctctgccagcactgcctatttggagatcatcaacctcaaaaatgaggacacggctacatatttctgtgcaagagatggtaactacggggatcctatggactactggggtcaaggaacctcagtcaccgtctcctca

SEQ ID NO: 543 - DNA, 351 bp, synthetic construct
  misc_feature 1..351: note = 14H10.2C9 VH DNA sequence
  source 1..351: mol_type = other DNA
cagatccagttggtacagtctggacctgagctgaagaagcctggagagacagtcaagatctcctgcaaggcttctgggtataccttcacaacctatggaatgggctgggtgaaacaggctccaggaaaggatttaaagtggatgggctggataaacacctactctggagtgccaacatatgctgatgacttcaagggacggtttgccttctctttggaaacctctgccagcactgcctatttgcagatcagcaacctcaaaaatgaagacacggctacatatttctgttcaaccccttatgaatacgacggggcttactggggccaggggactctggtcactgtctctgca

SEQ ID NO: 544 - DNA, 339 bp, synthetic construct
  misc_feature 1..339: note = 15F10.2D6 VH DNA sequence
  source 1..339: mol_type = other DNA
gaagtacagctggtggagtctgggggaggcttagtgaagcctggagggtccctgaaactctcctgtgcagcctctggattcgctttcagttcctatgccatgtcttgggttcgccagactccggaaaagaggctggagtgggtcgcaaccattagtgatggtggtgtttacacctactatacagaccatgtaaagggccgattcaccatctccagagacaatgccgaggacaacctgtacctgcaaatgagccatctgaagtctgaggacacagccatgtattattgtgtgagagatgggggctactggggccaaggcaccactctcacagtctcctca

SEQ ID NO: 545 - DNA, 348 bp, synthetic construct
  misc_feature 1..348: note = 19B5.2E6 VH DNA sequence
  source 1..348: mol_type = other DNA
cagatccaacttgttcagagcgggcctgaattgaagaaaccaggcgagactgtaaagatctcctgtaaggccagtggctatacattcaccacctacgcaatgagctgggtcaagcaggcacccggaaagggtctgaagtggatgggttggataaatacatactcaggcgtcccaacctacgctgatgatttgaaggggcgctttgccttttctcttgaaacctcagcatcaaccgcctacttgcagataaataacctcaaaaatgaagacaccgctacctatttctgcgcaagggggccttatgctatggactactggggccagggcacctctgtgactgtaagttct

SEQ ID NO: 546 - DNA, 345 bp, synthetic construct
  misc_feature 1..345: note = 20D11.2C6 VH DNA sequence
  source 1..345: mol_type = other DNA
gaggtccagctgcaacaatctggacctgaactggtgaagcctggggcttcagtgaagatatcctgtaaggcttctggatacacgttcactgacttctacataaactgggtgaagcagagccatggaaagagccttgagtggattggagatattaatcctaagaatggtggtattaactacaacccgaagttcaagatcaaggccacattgactgtagacaagtcctccagcacatcctacatggacctccgcggcctgacatctgaggactctgcagtctattactgcacctcaggctacggatttccttactggggccaagggactctggtcactgtctctgca

SEQ ID NO: 547 - DNA, 348 bp, synthetic construct
  misc_feature 1..348: note = 20H5.A3 VH DNA sequence
  source 1..348: mol_type = other DNA
cagatccagttggtacagtctggacctgagctgaagaagcctggagagtcagtcaagatctcctgcaaggcttctggttatgccttcacaacctatggaatgagctgggtgcaacaggctccaggaaagggtttaaagtggatgggctgggtaaacacctactctggagtgccaacatgtgctgatgacttcaagggacggtttgccttctctttggaaacctctgccagcactgcctatttgcagatcaacaacctcagaaatgaggacacggctacatatttctgtgcaagagggccctatgctatggactactggggtcaaggaacctcagtcaccgtctcctca

SEQ ID NO: 548 - DNA, 348 bp, synthetic construct
  misc_feature 1..348: note = 23H9.2E4 VH DNA sequence
  source 1..348: mol_type = other DNA
cagatccagttggtacagtctggacctgagctgaagaagcctggagagacagtcaagatctcctgcaaggcttctgggtataccttcacaacctatgcaatgagctgggtgaaacaggctccaggaaagggtttaaagtggatgggctggataaacacctactctggagtgccaacatatgctgatgacctcaagggacggtttgccttctctttggaaacctctgccagcactgcctatttgcagatcaacaacctcaaaaatgaggacacggctacatatttctgtgcaagagggccctatgctatggactactggggtcaaggaacctcagtcaccgtctcctca

SEQ ID NO: 549 - DNA, 360 bp, synthetic construct
  misc_feature 1..360: note = 2D10-VH0-VL0 VH DNA sequence
  source 1..360: mol_type = other DNA
cagtttcagcttcaacagtctggtcctgaactcgtaaagcctggggccagtgtaaaaatatcctgtaaggcatcaggatacactttcaccgattactacatcaactgggtaaagcagcgacctggtcagggactggagtggattggctggatctaccccggatcaaatgacaccaaatacaatgagaagttcaagggcaaagctacccttacagtcgatacctcctcctccaccgcatatatgcaacttgggtcactgacttcagaggattctgcagtctatttttgcgctaattactttggatgcagcggctggtttttcgacgtgtggggaaccggaaccacagtgacagtatcctct

SEQ ID NO: 550 - DNA, 357 bp, synthetic construct
  misc_feature 1..357: note = 3B11.2G2 VH DNA sequence
  source 1..357: mol_type = other DNA
cagatccagttggtacagtctggacctgagctgaagaagcctggagagacagtcaagatctcctgcaagacttctgggtataaattcaaaacctatgtaatgagctgggtgaaacaggctccaggaaaggctttaaagtggatgggctggataaacacctactctggagtgccaacatatgctgatgacttcaagggacggtttgccttctctttggaaacctctgccagcactgcctatttggagatcatcaacctcaaaaatgaggacacggctacatatttctgtgcaagagatggtaattacggggatcctatggactactggggtcaaggaacctcagtcaccgtctcctca

SEQ ID NO: 551 - DNA, 339 bp, synthetic construct
  misc_feature 1..339: note = 7D8.2D8 VH DNA sequence
  source 1..339: mol_type = other DNA
gaagtgcagctggtggagtctgggggaggcttagtgaagcctggagggtccctgaaactctcctgtgcagcctctggattcactttcagtagctatgccatgtcttgggttcgccagactccggaaaagaggctggagtgggtcgcaaccatcagtgatggtggtatttacacctactatccagacaatgtaaagggccgattcaccatttccagagacaatgccaagaacaacctgttcctgcaaatgagccatctgaagtctgaggatacagccatgtattactgtgtaagagatgggggctactggggccaaggcaccactctcacagtctcctca

SEQ ID NO: 552 - DNA, 348 bp, synthetic construct
  misc_feature 1..348: note = mIMT001 VH DNA sequence
  source 1..348: mol_type = other DNA
cagatccaacttgtgcagtcaggtccagaattgaagaagcctggtgagaccgtcaagatttcctgtaaggcctctggttatacttttaccaactatggcatgaattgggtcaagcaggcacctgggaagggtttgaaatggatggggtggataaataccaacacaggggaaccaacttacgttgaagagtttaagggtcgttttgcattcagtcttgagacttctgcaagcacagcttacctccaaattaacaatctcaaaaatgaagatactgctacatatttctgtgctccttatgataattttttcgcctactggggacagggaactctggtcaccgtctcagca

SEQ ID NO: 553 - DNA, 348 bp, synthetic construct
  misc_feature 1..348: note = 4A11.2B5 VH DNA sequence
  source 1..348: mol_type = other DNA
caggtacaacttcagcagagcggtccagaacttgtgaagcccggtgctagtgtcaaaatatcttgcaaagcaagtggttattccttcaccaactattacatacactgggtaaaacaacgtccagggcaaggactcgaatggattggttggatctaccccggcagcggcaacactaactacaacgagaagtttaaaggcaaagctactctcacagcagacacttctagcagtacaacaaatatgcagttgtcctctctgacttccgaagacagcgccgtctattactgttctactgcacccggaggttttgacgtctggggttccggcaccacagttaccgttagttcc

SEQ ID NO: 554 - DNA, 348 bp, synthetic construct
  misc_feature 1..348: note = 4A11.H1L1 VH DNA sequence
  source 1..348: mol_type = other DNA
caggtgcagctggtgcaatcaggagccgaagttaagaagcctggcgccagcgtcaaggtctcatgtaaagcctccggttacagtttcaccaactactatatgcactgggttaggcaagcaccaggccaggggcttgagtggatgggatggatctatccagggagcggtaacaccaattacaatgagaagtttcaagggcgcgtaaccatgacagcagataccagtataagcaccgcctatatggaactctctcggttgagatccgatgataccgctgtttattactgctctaccgcacctggtggtttcgacgtttggggccaaggtactacagtgaccgtatcatca

SEQ ID NO: 555 - DNA, 348 bp, synthetic construct
  misc_feature 1..348: note = 4A11.H4L2 VH DNA sequence
  source 1..348: mol_type = other DNA
caggtgcaactggtccagtctggggccgaggtcaaaaagcctggagcctccgtcaaagtgtcatgtaaagcctcagggtatagtttcaccaactactatatacattgggtcagacaagccccaggccagcgtcttgagtggatgggatggatttatcccggatcagggaatacaaactataacgagaaatttcaaggcagagttactctcactgccgatacctctgcaagtactacctatatggagctctccagtctcagaagcgaagacacagcagtatattactgtagcaccgccccaggcgggtttgacgtgtggggccaaggcactactgtaaccgttagctca

SEQ ID NO: 556 - DNA, 357 bp, synthetic construct
  misc_feature 1..357: note = 4G2.2G6 VH DNA sequence
  source 1..357: mol_type = other DNA
caaatacagctcgtgcagtctggtcccgatttgaagaagcctggagaaaccgtaaagataagctgtaaggctagtggttacactttcacaacatacgttatgtcatgggttaaacaggctcctggaaaagaccttaaatggatgggatggattaacacccatagcggtgtcccaacttacgctgacgattttaagggacgatttgacttttctctcgaaacttctgccaacacagcttttttgcagatcaacaatctcaagaatgaagacaccgcaacctatttctgcactcgagatgggaacgacggggatgcaatggataactggggacaaggcacatcagttaccgtgagctct

SEQ ID NO: 557 - DNA, 360 bp, synthetic construct
  misc_feature 1..360: note = 6B3.2D3 VH DNA sequence
  source 1..360: mol_type = other DNA
caggtgcagctgaagcagtcaggacctggcctagtgcagccctcacagagcctgtccatcacctgcacagtctctggtttctcattaactagttatggtgtacactgggttcgccagcctccaggaaagggtctggagtggctgggagtgatatggagtggtggaagcacagactataatgctgctttcatatccagactgagcatcagtaaggacaactccaagagccaagttttctttaaaatgaacagtctgcaagctgatgacactgccatatactactgtgccaaagggccttatgattacgacttaggctggtttgcttactggggccaagggactctggtcactgtctctgca

SEQ ID NO: 558 - DNA, 348 bp, synthetic construct
  misc_feature 1..348: note = 6H6.2D6 VH DNA sequence
  source 1..348: mol_type = other DNA
cagatccagctggtgcagtccggccccgagctgaagaagcccggcgagactgtgaagatctcctgcaaggcctccggctacaccttcaccacctacggcatgtcctgggtgaagcaggcccccggcaagggcctgaagtggatggcctggatcaacacctactccggcgtgcccacctacgccgacgacttcaagggcaggttcgccttctccctggagacttccgcctccaccgcctacctgcagatcaacaacctgaccaacgaggacaccgccacctacttctgcgccaggggcccctacgccatggactactggggccagggcacctccgtgaccgtgtcctcc

SEQ ID NO: 559 - DNA, 345 bp, synthetic construct
  misc_feature 1..345: note = 9H2.2H10 VH DNA sequence
  source 1..345: mol_type = other DNA
caggtccagctgcagcagcctggggctgaactggtggggcctgggtcttcagtgaagctgtcctgcaaggcttctggctacaccttcaccaactactggatacattgggtgaagcagaggcctctacaaggccttgaatggattggtaacattgacccttctgatagtgaaactcactacaatcaaaagttcaaggacaaggccacattgactgtagacaaatcctccagcacagcctacatgcaactcagcagcctgacatctgaggactctgcggtctattactgtgcaagacatggttactacgactactggggccaaggcaccactctcacagtctcctca

SEQ ID NO: 560 - DNA, 357 bp, synthetic construct
  misc_feature 1..357: note = 13G4.2F8 VH DNA sequence
  source 1..357: mol_type = other DNA
caggtccagctgcagcagcctggggctgagctggtaaagcctggggcttcagtgaagttgtcctgcaaggcttctggctacactttcaccagctactggatgcactgggtgaagcagaggcctggacaaggccttgagtggattggaatgattcatcctaacagtggtagtactgactacaatgagaagttcaagaacaaggccacactgaatgtagacaaatcctccagtacagcctacatacaactcagcagcctgacatctgaggactctgcggtctattactgtacaagatgggggatttattactacgcgagggactactggggccaaggcaccactctcacagtctcctca

SEQ ID NO: 561 - DNA, 351 bp, synthetic construct
  misc_feature 1..351: note = 13H12.2F8 VH DNA sequence
  source 1..351: mol_type = other DNA
cagatccagctggtccaatcaggacccgaactgaaaaaaccaggcgagacagtcaaaatcagctgtaaggcctcaggctacactttcacaacctacgggatgtcatgggtaaagcaagctcctggcaaggggctgaaatggatgggttggatcaacacatactctggagtgcccacctacgctgacgactttaagggtagattcgcatttagcctggaaacaagtgccagtacagcctacctccagataaacaacttgaaaaacgaggataccgcaacctatttttgcgccgtcccctacgagtacgacggtgcctattggggtcagggtacactcgtaacagtttccgcc

SEQ ID NO: 562 - DNA, 345 bp, synthetic construct
  misc_feature 1..345: note = 15G7.2A7 VH DNA sequence
  source 1..345: mol_type = other DNA
gaggtccagctgcaacaatctggacctgagctggtgaagcctggggcttcagtgaagatatcctgtaaggcttctggatacacgttcactgactactacatgaactgggtgaagcagagccatggaaagagccttgagtggattggagatattaatcctaacaatggtggtactaactacaaccagaagttcaagggcaaggccacattgactgtagacaagtcctccagcacagcctacatggagctccgcagcctgacatctgaggactctgcagtctattactgcacctcaggctacgggtttccttactggggccaggggactctggtcactgtctctgca

SEQ ID NO: 563 - DNA, 351 bp, synthetic construct
  misc_feature 1..351: note = 19D9.2E5 VH DNA sequence
  source 1..351: mol_type = other DNA
cagatccagttggtacagtctggacctgagctgaagaagcctggagagacagtcaagatctcctgcaaggcttctggatataccttcacaacctatggaatgggctgggtgaaacaggctccaggaaagggtttgaagtggatgggctggataaacacctactctggcgtgccaacatatgctgatgacttcaagggacggtttgccttctctttggaaacctctaccagcactgcctatttgcagatcaacaacctcaaaaatgaggacatggctacatatttctgtgcaaccccttatgaatacgacggggcttactggggccaagggactctggtcactgtctctgca

SEQ ID NO: 564 - DNA, 336 bp, synthetic construct
  misc_feature 1..336: note = 23B10.2B12 VH DNA sequence
  source 1..336: mol_type = other DNA
caggtccagctgcagcagtctggacctgaactggtgaagcctggggattctgtgaagatatcctgcaaggctgctggctacaccttcagtgactattatataaactgggtgaagcagaggcctggacagggacttgagtggattggatggatttatcctgtaagcgttaatactaagtacaatgagaagttcaagggcaaggccacattgactgtagacacatcctccagcacagcctacatgcagctcagcagcctgacctctgaggactctggggtctatttctgtgcctaccttgattattggggccaagggactctggtcactgtctctgca

SEQ ID NO: 565 - DNA, 360 bp, synthetic construct
  misc_feature 1..360: note = 24D12.2H9 VH DNA sequence
  source 1..360: mol_type = other DNA
caggtgcagctgaagcagtcaggacctggcctagtgcagccctcacagagcctgtccatcacctgcacagtctctggtttctcattaactagctatggtgtacactgggttcgccaggctccaggaaagggtctggaatggctgggagtgatatggagtggtggaagcacagactataatgctgctttcatgtccagactgagcatcagcaaggacaactccaagagccaagttttctttaaaatgaacagtctgcaagctgatgacactgccatatactactgtgccaaaagccctgatggttacgacgtcgcctggtttggttactggggccaagggactctggtcactgtctctgca

SEQ ID NO: 566 - DNA, 366 bp, synthetic construct
  misc_feature 1..366: note = F846C.1B2 VH DNA sequence
  source 1..366: mol_type = other DNA
cagatccagttggtgcagtctggacctgagctgaagaagcctggagagacagtcaagatctcctgcaaggcttctgggtataccttcacaaactatggaatgaattgggtgaagcaggctccaggaaagggtttaaagtggatgggctggataaacacctacactggagagccatcatatgctgatgacttcaagggacggtttgccttctctttggaaacctctgccagcactgcctatttgcagatcaacaacctcaaaaatgaggacatggctacatatttctgtgcaagatgggggggttacgctggggattactatgctatggacttctggggtcaaggaacctcagtcaccgtctcctca

SEQ ID NO: 567 - DNA, 366 bp, synthetic construct
  misc_feature 1..366: note = F846C.1F5 VH DNA sequence
  source 1..366: mol_type = other DNA
cagatccagttggtgcagtctggacctgagctgaagaagcctggagagacagtcaagatctcctgcaaggcttctgggtataccttcacaaactatggaatgaactgggtgaagcaggctccaggaaagggtttaaagtggatgggctggataaacacctacactggagagccatcatatgctgatgacttcaagggacggtttgccttctctttggaaacctctgccagcactgcctatttgcagatcaacaacctcaaaaatgaggacatggctacatatttctgtgcaagatgggggggttacgatggggattactatgctatggactactggggtcaaggaacctcagtcaccgtctcctca

SEQ ID NO: 568 - DNA, 366 bp, synthetic construct
  misc_feature 1..366: note = F846C.1H12 VH DNA sequence
  source 1..366: mol_type = other DNA
cagatccagttggtgcagtctggacctgagctgaagaagcctggagagacagtcaagatctcctgcaaggcttctgggtataccttcacaaactttggaatgaactgggtgaagcaggctccaggaaagggtttaaagtggatgggctggataaacacctacactggagagccatcatatgctgatgacttcaagggacggtttgccttctctttggaaacctctgccagcactgcctatttgcagatcaacaacctcaaaaatgaggacattgctacatatttctgtgcaagatgggggggttacgctggggattactatgctatggactactggggtcaaggaacctcagtcaccgtctcctca

SEQ ID NO: 569 - DNA, 348 bp, synthetic construct
  misc_feature 1..348: note = F846C.1H5 VH DNA sequence
  source 1..348: mol_type = other DNA
gaggtccagctgttggagtctgggggaggcttagtgaagcctggagggtccctgaaactctcctgtgcagcctctggattcactttcagcagctatgccatgtcttgggttcgccagactccagagaagaggctggagtgggtcgcatccattagtagtggtggtgacacctactatccagacagtgtgaagggccgattcaccatctctagagataatgccaggaacatcctgtacctgcaaatgagcagtctgaggtctgaggacacggccatgtattactgtgcaagttatggtaactccctctttgactactggggccaaggcaccactctcacagtctcctca

SEQ ID NO: 570 - DNA, 366 bp, synthetic construct; identical to SEQ ID NO: 567
  misc_feature 1..366: note = F846C.2H3 VH DNA sequence
  source 1..366: mol_type = other DNA

SEQ ID NO: 571 - DNA, 342 bp, synthetic construct
  misc_feature 1..342: note = F846TC.14A2 VH DNA sequence
  source 1..342: mol_type = other DNA
cagatccagttggtgcagtctggacctgagctgaagaagcctggagagacagtcaagatctcctgcaaggcttctgggtataccttcacaaactatggaatgaactgggtgaagcaggctccaggaaagggtttaaagtggatgggctggataaacacctacactggagagccaacatatgctggtgacctcaagggacggtttgccttctctttggaaacctctgccagcactgcctatttgcagatcaacaacctcaaaaatgaggacacggctacatatttctgtgtaagatatactatggactactggggtcaaggaacctcagtcaccgtctcctca

SEQ ID NO: 572 - DNA, 372 bp, synthetic construct
  misc_feature 1..372: note = F846TC.14E4 VH DNA sequence
  source 1..372: mol_type = other DNA
caggttactctgaaagagtctggccctgggatattgcagccctcccagaccctcagtctgacttgttctttctctgggttttcactgagcacttctggtatgggtgtaggctggattcgtcagccttcagggaagggtctggagtggctggcacacatttggtgggatgatgataagtactataacacagccctgaagagcgggctcacaatctccaaggatgcctccaaaaaccaggtcttcctcaagatcgccagtatggacactgcagatactgccacatactactgtgctcgaaacctctatgatggttcctacgggtactatgctatggactactggggtcaaggaacctcagtcaccgtctcctca

SEQ ID NO: 573 - DNA, 366 bp, synthetic construct
  misc_feature 1..366: note = F846TC.16B5 VH DNA sequence
  source 1..366: mol_type = other DNA
cagatccagttggtgcagtctggacctgagctgaagaagcctggagagacagtcaagatctcctgcaaggcttctgggtataccttcacaaactatggaatgaactgggtgaagcaggctccaggaaagggtttaaagtggatgggctggataaacacctacactggagagccagcatatgctgatgacttcaagggacggtttgccttctctttggaaacctctgccagcactgcctatttgcagatcaacaacctcaaaaatgaggacatggctacatatttctgtgcaagatgggggggttacgatggggattactatgctatggactactggggtcaaggaacctcagtcaccgtctcctca

SEQ ID NO: 574 - DNA, 369 bp, synthetic construct
  misc_feature 1..369: note = F846TC.7F10 VH DNA sequence
  source 1..369: mol_type = other DNA
gaagtgcagctggtggagtctgggggagacttagtgaagcctggagggtccctgaaactctcctgtgcagcctctggattcactttcagtaactatggcttgtcttggattcgccagactccagacaagaggctggagtgggtcgcaaccattagtagtggtggtagttacacctactatcctgacagtgtgaaggggcgattcaccatctccagagacagtgccaagaacaccctgtacctgcaaatgagcagtctgaagtctgaggacacagccatgtattactgtgcaagacatgcgcattactacggtgttagcccgtactactttgactactggggccaaggcacctgtctcacagtctcctca

SEQ ID NO: 575 - DNA, 357 bp, synthetic construct
  misc_feature 1..357: note = F847C.10B9 VH DNA sequence
  source 1..357: mol_type = other DNA
cagatccagttggtgcagtctggacctgaggtgaagaagcctggagagacagtcaagatctcctgcaaggcttctgggtatatcttcacaaactatggaatgaactgggtgaagcaggctccaggaaagggtttaaagtggatgggctggataaacacctacactggagagccaacatatactgatgacttcaagggacggtttgccttctctttggaaacctctgccagcactgcctatttgcagatcaacaacctcaaaaatgaggacacggctacatatttctgtgcaaagtttggtaactacgtgggagctatggactactggggtcaaggaacctcagtcaccgtctcctca

SEQ ID NO: 576 - DNA, 360 bp, synthetic construct
  misc_feature 1..360: note = F847C.11B1 VH DNA sequence
  source 1..360: mol_type = other DNA
gaggtccagcttcagcagtctggacctgagctggtgaaacctggggcctcagtgaagatatcctgcaaggcttctggaaacacattcactgaccacaacatgcactgggtgaagcagagccatggaaagagccttgagtggattggatatatttatccttacaatggtggtactggctacaaccagaagttcaagagcaaggccacattgactgtagacaattcctccagcacagtctacatggagctccgcagcctgacatctgaggactctgcagtctattactgtgcaagaggggagtatgattacctggcctggtttgcttactggggccaagggactctggtcactgtctctgca

SEQ ID NO: 577 - DNA, 357 bp, synthetic construct
  misc_feature 1..357: note = F847C.12F12 VH DNA sequence
  source 1..357: mol_type = other DNA
cagatccagttggtgcagtctggacctgagctgaagaagcctggagagacagtcaagatctcctgcaaggcttctgggtataccttcacaaactatggaatgaactgggtgaagcaggctccaggaaagggtttaaagtggatgggctggataaacacctacactggagagccaacatatgttgatgacttcaagggacggtttgccttctctttggaaacctctgccagcactgcctatttgcggatcaacaacctcaaaaatgaggacacggctacatatttctgtgcaaagtttggtaactacgtgggagctatggactactggggtcaaggaacctcagtcaccgtctcctca

SEQ ID NO: 578 - DNA, 357 bp, synthetic construct; identical to SEQ ID NO: 575
  misc_feature 1..357: note = F847C.26F5 VH DNA sequence
  source 1..357: mol_type = other DNA

SEQ ID NO: 579 - DNA, 351 bp, synthetic construct
  misc_feature 1..351: note = F847C.4B10 VH DNA sequence
  source 1..351: mol_type = other DNA
gaggtgcagcttgttgagactgggggaggcttagtgaagcctggagggtccctgaaactctcctgtgcagcctctggattcactttcagtagctatgccatgtcttgggttcgccagactccagagaagaggctggagtgggtcgcatccattagtagtggtggtagcacctactatccagacagtgtgaagggccgattcaccatctccagagataatgccaggaacatcctgtacctgcaaatgagcagtctgaggtctgaggacacggccatgtattactgtacaaggtttactacggtagtagagatggactactggggtcaaggaacctcagtcaccgtctcctca

SEQ ID NO: 580 - DNA, 336 bp, synthetic construct
  misc_feature 1..336: note = F849C.8D10 VH DNA sequence
  source 1..336: mol_type = other DNA
caggtccaactgcagcagactggtgctgagcttgtgaagcctggggcctcagtgaagctgtcctgcaaggcttctggctatactttcaccagctactggataaactgggtgaagcagaggcctggacaaggccttgagtggattggaaacatttatcctggtagtagtagtatttactacagtgagaagttcaagagtaaggccacactgactgtagacacatcctccagcacagcctacatgcagctcagcagcctgacatctgacgactctgcggtctattattgtgcaagatggggctactggggccaaggcaccactctcacagtctcctca

SEQ ID NO: 581 - DNA, 363 bp, synthetic construct
  misc_feature 1..363: note = F849C.8H3 VH DNA sequence
  source 1..363: mol_type = other DNA
caggttactctgaaagagtctggccctgggatattgcagccctcccagaccctcagtctgacttgttctttctctgggttttcactgagcacttttggtatgggtgtaggctggattcgtcagccttcagggaagggtctggagtggctggcacacatttggtgggatgatgataaacactataacccagccctgaagagccggctcacaatctccaaggatacctccaaaaaccaggtcttcctcaggatcgccaatgtggacactgcagataatgccacatattactgtgctcgaatcgactatggtgactacgtcgggtttgcttattggggccaagggactctggtcactgtctctgca

SEQ ID NO: 582 - DNA, 354 bp, synthetic construct
  misc_feature 1..354: note = 846.2B11 VH DNA sequence
  source 1..354: mol_type = other DNA
caggtccagctacagcagtctggacctgagctggtgaggcctggggctttagtgaagatttcctgcaaggcttctggttacaccttcacaagctacgatataaactgggtgaagcagaggcctggacagggacttgagtggattggatggatttatcctggagatggtagtactaaatataatgagaaattcaagggcaaggccacactgactgcagacaaatcctccagcacagcctacatgcagctcagcagcctgacttctgagaactctgcagtctatttctgtgcaagagaggcggcttctaatgctatggactactggggtcaaggaacctcagtcaccgtctcctca

SEQ ID NO: 583 - DNA, 366 bp, synthetic construct
  misc_feature 1..366: note = 846.4D5 VH DNA sequence
  source 1..366: mol_type = other DNA
gaagtgaagcttgaggagtctggaggaggcttggtgcaacctggaggatccatgaaactctcctgtgttgcctctggattcactttcagtaactactggatgaactgggtccgccagtctccagagaaggggcttgagtgggttgctgaaattagattgaaatctaataattatgcaacacattatgcggagtctgtgaaagggaggttcaccatctcaagagatgattccaaaagtagtgtctacctgcaaatgaacaacttaagagctgaagacactggcatttattactgtaccaggcactacggctttccctactggtacttcgatgtctggggcgcagggaccacggtcaccgtctcctca

SEQ ID NO: 584 - DNA, 354 bp, synthetic construct
  misc_feature 1..354: note = 846T.1H2 VH DNA sequence
  source 1..354: mol_type = other DNA
cagatccagttggtgcagtctggacctgagctgaagaagcctggagagacagtcaagatctcctgcaaggcttctgggtataccttcacaaactatggaatgaactgggtgaagcaggctccaggaaagggtttaaagtggatgggctggataaacaccaacactggagagccaacatatgctgaagagttcaagggacggtttgccttctctttggaaacctctgccagcactgcctatttgcagatcaacaacctcaaaaatgaggacacggctacatatttctgtgcaaccggggggggtaactgggactttgactactggggccaaggcaccactctcacagtctcctca

SEQ ID NO: 585 - DNA, 342 bp, synthetic construct
  misc_feature 1..342: note = 847.14H4 VH DNA sequence
  source 1..342: mol_type = other DNA
cagatccagttggtgcagtctggacctgaactgacgaagcctggagagacagtcaagatctcctgtaaggcttctggctataccttcacagactatggaatgaactgggtgaggcaggctccaggagagactttaaagtggatgggctggataaacacctacactggagagccaacatatgctgatgacttcaaggggcggtttgccttctctttggaatcctctgccagcactgcctatttgcagatcaacaacctcaaaaatgaggacgtggctacatatttctgtgcaagataccctatggactactggggtcaaggaacctcagtcaccgtctcctca

SEQ ID NO: 586 - DNA, 366 bp, synthetic construct
  misc_feature 1..366: note = 846.2D4 VH DNA sequence
  source 1..366: mol_type = other DNA
gaagtgaagcttgaggagtctggaggaggcttggtgcaacctggaggatccatgaaactctcctgtgttgcctctggattcactttcagtaactactggatgaactgggtccgccagtctccagagaaggggcttgagtgggttgctgaacttagattgaaatctaataattatgcaacacattatgcggagtctgtgaaagggaggttcaccatctcaagagatgattccaaaagtagtgtctacctgcaaatgaacaacttaagagctgaagacactggcatttattactgtaccaggcactacggctttccctactggtacttcgatgtctggggcgcagggaccacggtcaccgtctcctca

SEQ ID NO: 587 - DNA, 354 bp, synthetic construct
  misc_feature 1..354: note = 846.2F11 VH DNA sequence
  source 1..354: mol_type = other DNA
gaggtccagctgcagcagtctggacctgagctggtgaagcctggggcttcagtgaagatgtcctgcaaggcttctggatacacattcactagctatgttatgcactgggtgaagcagaagcctgggcagggccttgagtggattggatatattaatccttacaatgatggtactaagtacaatgagaagttcaaaggcaaggccacactgacttcagacaaatcctccagcacagcctacatggagctcagcagcctgacctctgaggactctgcggtctattactgtgcaagattacttttttactatgctatggactactggggtcaaggaacctcagtcaccgtctcctca

SEQ ID NO: 588 - DNA, 354 bp, synthetic construct
  misc_feature 1..354: note = 846T.10B1 VH DNA sequence
  source 1..354: mol_type = other DNA
caggttcagctgcagcagtctggacctgagctggtgaggcctggggctttagtgaagatttcctgcaaggcttctggttacaccttcacaagctacgatataaactgggtgaagcagaggcctggacagggacttgagtggattggatggatttatcctggagatggtagtactaaatacaatgagaaattcaagggcaaggccacactgactgcagacaaatcctccagcacagtttacatgcagctcagcagcctgacttctgagaactctgcagtctatttctgtgctagagaggcggcttctaatgccatggactactggggtcaaggaacctcagtcaccgtctcctca

SEQ ID NO: 589 - DNA, 354 bp, synthetic construct
  misc_feature 1..354: note = 846T.2E3 VH DNA sequence
  source 1..354: mol_type = other DNA
caggtccagctgcagcagtctggacctgagctggtgaagcctggggctttagtgaagatatcctgcaaggcttctggttacaccttcacaagctacgatataaactgggtgaagcagaggcctggacagggacttgagtggattggatggatttatcctggagatggtagtactaagtacaatgagaaattcaagggcaaggccgcactgactgcagacaagtcctccagcacagcctacatgcagctcagcagcctgacttctgagaactctgcagtctatttctgtgcaagagaggcggcttctaatgctatggactactggggtcaaggaacctcagtcaccgtctcctca

SEQ ID NO: 590 - DNA, 354 bp, synthetic construct
  misc_feature 1..354: note = 846T.4C9 VH DNA sequence
  source 1..354: mol_type = other DNA
gaggtccagctgcagcagtctggacctgagctggtaaagcctggggcttcagtgaagatgtcctgcaaggcttctggatactcattcactaactatattatgcactgggtgaagcagaagcctgggcagggccttgagtggattggatatattaatccttacaatgatggtactaagtacaatgagaagttcaaaggcaaggccacactgacttcagacaaatcctccagcacagcctacatggagctcagcagcctgacctctgaggactctgcggtctattactgtgcaagattacttttttactatgctatggactactggggtcaaggaacctcagtcaccgtctcctca

SEQ ID NO: 591 - DNA, 354 bp, synthetic construct
  misc_feature 1..354: note = 846T.4E11 VH DNA sequence
  source 1..354: mol_type = other DNA
caggttcagctgcagcagtctggagctgaactggtaaagcctggggcttcagtgaagttgtcctgcaaggcttctggctacaccttcagaagctatgatataaactgggtgaggcagaggcctgaacagggacttgagtggattggatggatttttcctggagaaggtatttctaagtacaatgagaagttcaagggcaaggccacactgactacagacaaattgtccagcacagcctacatgcagctcagcagcctgacatctgaggactctgctgtctatttctgtgcaagagaggctacggctggggctatggactactggggtcaaggaacctcagtcaccgtctcctca

SEQ ID NO: 592 - DNA, 366 bp, synthetic construct
  misc_feature 1..366: note = 846T.4F5 VH DNA sequence
  source 1..366: mol_type = other DNA
gaggtgaagcttctcgagtctggaggaggcttggtgcaacctggaggatccatgaaactctcctgtgttgcctctggattcactttcagtaacttctggatgaactgggtccgccagtctccagagaaggggcttgagtgggttgctgaaattagattgaaatctaataattatgcaacacattatgcggagtctgtgaaagggaggttcaccatctcaagagatgattccaaaagtagtgtctacctgcaaatgaacaacttaagagctgaagacactggcatttattactgtaccaggcactacggctttccctactggtacttcgatgtctggggcgcagggaccacggtcaccgtctcctca

SEQ ID NO: 593 - DNA, 354 bp, synthetic construct
  misc_feature 1..354: note = 846T.8D1 VH DNA sequence
  source 1..354: mol_type = other DNA
cagattcagttgcagcagtctggagctgaactggtaaagcctggggcttcagtgaagttgtcctgcaaggcttctggctacaccttcacaagctatgatatatgctgggtgaggcagaggcctgagcagggacttgagtggattggatggatttttcctggagatggtactactaagtacactgagaacttcaagggcaaggccacactgactacagacaaatcctccagcacagcctacatgcacctcagcaggctgacatctgaggactctgctgtctatttctgtgcaagggagggggcgggctcctggtttgcttactggggccaagggactctggtcactgtctctgca

SEQ ID NO: 594 - DNA, 342 bp, synthetic construct
  misc_feature 1..342: note = 847.10C9 VH DNA sequence
  source 1..342: mol_type = other DNA
gaggttcagctgcagcagtctggagctgagctggtgcggcctgggacttcagtgaaggtgtcctgcaaggcttcggaatacgccttcaataattacatgatggaatgggtaaaacagaggcctggacagggccttgagtggattggagtgattaatcccggaagtggtgctactaattacaatgagaatttcaaggacaaggcaacactgactgcagacaaatcctccaccactgcctacatgcagctcagcagcctgacatctgatgactctgcggtctatttctgtacctacaatgatcttggttactggggccaagggactctggtcactgtctctgca

SEQ ID NO: 595 - DNA, 369 bp, synthetic construct
  misc_feature 1..369: note = 847.11D6 VH DNA sequence
  source 1..369: mol_type = other DNA
gaggtcaagctgcagcagtctggacctgagctgatgaagcctggaacttcaatgaagatatcctgtaaggcttctggttactcattcaccggctacaccatgaactgggtgaagcagagccatggaaagaaccttgagtggattggacttattaatccttacaatggtggtactaactacaaccagaagttcaggggcaaggccacattaagtgtagacaagtcatccaacacagcctacatggagctcctcagtctgacatctgaagactctgcagtctattactgtgcaagaaaggacgattattacggaagtagtccctatgctctggactactggggtcaaggaacctcagtcaccgtctcctca

SEQ ID NO: 596 - DNA, 348 bp, synthetic construct
  misc_feature 1..348: note = 847.15D12 VH DNA sequence
  source 1..348: mol_type = other DNA
caggtccagctgcagcagtctggagctgagctgatgaagcctggggcctcagtgaagatatcctgcaaggctactggctacacattcactaactactggatagagtgggtaaagcagaggcctggacatggccttgaatggattggagaatttttacctggagatggcagtagtcactacaatgagaagttcaagggcaaggccacattcacttcagatacatcctccaacacagcctacatacacctcaccagcctgacatctgaggactctgccgtctattactgtgtaagagatgactacgacagtgactactgggcccaaggcaccactctcacagtctcctca

SEQ ID NO: 597 - DNA, 360 bp, synthetic construct
  misc_feature 1..360: note = 847.15F9 VH DNA sequence
  source 1..360: mol_type = other DNA
caggtgcagatgaagcagtcaggacctggcctagtgcagccctcacagagcctgtccatcacctgcacagtctctggtttctcattaatcaactatggtgtacactgggttcgccaatctccaggaaagggtctggagtggctgggagtgatatggagtggtggaagcacagactataatgcagctttcatatccagactgagcatcagcaaggacaattccaagagccaagttttctttaaaatgaacagtctgcaagctgatgacacagccatatattactgtgccagaatttattactacggtaggggctatgctatggactactggggtcaaggaacctcagtcaccgtctcctca

SEQ ID NO: 598 - DNA, 366 bp, synthetic construct
  misc_feature 1..366: note = 847.15H11 VH DNA sequence
  source 1..366: mol_type = other DNA
gaggtccagcttcagcagtctggggctgaagttgtgaagcctggggctccagtgaagctgtcctgcaaggcttctggctacaccttcaacaactactggctgaactgggtgaaacagcggcctggacgaggcctcgagtggattggaaggattgatccttccgatagtgaaactcactacaatcaaaagttcaaggacaaggccacactgactgtagacatgtcctccagcacagcctacatccaactcagcagcctgacatctgaggactctgcggtctattactgtgcaagaggggattattattacggtactaggggtcctatggactactggggtcaaggcacctcagtcaccgtctcctca

SEQ ID NO: 599 - DNA, 345 bp, synthetic construct
  misc_feature 1..345: note = 847.20H7 VH DNA sequence
  source 1..345: mol_type = other DNA
caggtccagctgcagcagtctggggctgagctggtgaggcctggggcttcagtgaacctgtcctgcaaggcttctggctacaccttcaccaactactggatgaactgggtgaagcagaggcctggacaaggccttgaatgggttggtatgattgatccttcagacagtgaaactcactacaatcaaatgttcaaggacaaggccacattgactatagacaaatcttccagcatagcctacatgcagctcagcagcctgacatctgaggactctgcggtctattactgtgcaagatggggtgctatggactactggggtcaaggaacctcagtcaccgtctcctca

SEQ ID NO: 600 - DNA, 363 bp, synthetic construct
  misc_feature 1..363: note = 847.21B11 VH DNA sequence
  source 1..363: mol_type = other DNA
caggtgcaactgaagcagtcaggacctggcctggtggcgccctcacagagcctgtccatcacttgcactgtctctggattttcattaaccagctatggtgtacactgggttcgccagcctccaggaaagggtctggagtggctgggaataatatgggctggtggaagcacaaattataatccggctctcatgtccagactgagcatcagcaaagacaaatccaagagccaagttttcttaaaaatgaacagtctgaaaactgatgacacagccatgtactactgtgccagagatcgggcttcattactacggccgggggctatggactactggggtcaaggaacctcagtcaccgtctcctca

SEQ ID NO: 601 - DNA, 354 bp, synthetic construct
  misc_feature 1..354: note = 847.27B9 VH DNA sequence
  source 1..354: mol_type = other DNA
cagatccagttggtgcagtctggacctgagctgaagaagcctggagagacagtcaagatctcctgcaaggcttctgggtataccttcacaaactatggaatgaactgggtgaagcaggctccaggaaagggtttaaagtggatgggctggataaacaccaacactggagagccaacatatgctgaagagttcaagggacggtttgccttctctttggagacctctgccagcactgcctatttgcagatcaactacctcaaaaatgaggacacggctacatttttctgtgcaagattggactatgattacgacgaggactactggggccaaggcaccactctcacagtctcctca

SEQ ID NO: 602 - DNA, 360 bp, synthetic construct
  misc_feature 1..360: note = 847.28D1 VH DNA sequence
  source 1..360: mol_type = other DNA
caggtgcagcttgtagagaccggacctggcctggtggcgccctcacagagcctgtccatcacttgcactgtctctgggttttcattaaccagctatggtgtacactggattcgtcagtctccaggaaagggtctggagtggctgggaactatatgggctggtggaagcacagattataattcgccactcatgtccagactgagcatcagcaaagacaactccaagaaccaagtttttttaaaaatgaatagtctgcagattgatgacacagccatatattattgtgccagtcctccttctgggtatgattacgacgtgtttgcttcctggggccaagggactctggtcactgtctctgca

SEQ ID NO: 603 - DNA, 360 bp, synthetic construct
  misc_feature 1..360: note = 847.2B8 VH DNA sequence
  source 1..360: mol_type = other DNA
caggtacaactgaagcagtcaggacctggcctagtgcagccctcacagagcctgtccatcacctgcacagtctctggtttctcattaatcaactatggtgtacactgggttcgccaatctccaggaaagggtctggagtggctgggagtgatatggagtggtggaagcacagactataatgcagctttcatatccagactgagcatcagcaaggacaattccaagagccaagttttctttaaaatgaacagtctgcaagctgatgacacagccatatattactgtgccagaatttattactacggtaggggctatgctatggactactggggtcaaggaacctcagtcaccgtctcctca

SEQ ID NO: 604 - DNA, 360 bp, synthetic construct
  misc_feature 1..360: note = 847.3B3 VH DNA sequence
  source 1..360: mol_type = other DNA
caggtgcagctgaaggagtcaggacctggcctggtggcgccctcacagagcctgtccatcacttgcactgtctctgggttttcattaaccagctatggtgtacactggattcgccagcctccaggaaagggtctggagtggctgggaggaatatgggctggtggaagtacagattacaattcgcctctcatgtcccgactgagtatcactaaagacaactccaagagccaagttttcttaaaaatgaacagtctgcaaagtgatgacacagccatgtactactgtgccagtcctccctctgggtatgattacgacgtgtttgcttactggggccaagggactctggtcactgtctctgca

SEQ ID NO: 605 - DNA, 360 bp, synthetic construct
  misc_feature 1..360: note = 849.1D2 VH DNA sequence
  source 1..360: mol_type = other DNA
caggtgcagctgaaggagtcaggacctgtcctggtggcgccctcacagagcctgtccatcacttgcactgtctctgggttttcattaagcagctatggtgtacactgggttcgccagcctccaggaaagggtctggagtggctgggagtaatatgggctggtggaagcacagattatgattcagctctcatgtccagactgagcatcagcaaagacaactccaagagccaagttttcttaaaaatggacagtctgcaaactgatgacacagccatgtactactgtgccaaacccccatatgattacgacggggcctggtttgcttactggggccaagggactctggtcactgtctctgca

SEQ ID NO: 606 - DNA, 342 bp, synthetic construct
  misc_feature 1..342: note = 849.2D7 VH DNA sequence
  source 1..342: mol_type = other DNA
caggtgcaactgcagcagtctgggcctcagctggttaggcctggggcttcagtgaagatatcctgcaaggcttctggttactcattcaccaactactggatgcactgggtgaagcagaggcctggacaaggtcttgagtggattggcatgattgatccttccgatagtgaaactaggttaaatcagaagttcaaggacaaggccacattgactgtagacaaatcctccagcacagcctacatgcaactcagcagcccgacatctgaggactctgcggtctattactgtgcaacggggagacccgactactggggccaaggcaccactctcacagtctcctca

SEQ ID NO: 607 - DNA, 342 bp, synthetic construct
  misc_feature 1..342: note = 849.2F12 VH DNA sequence
  source 1..342: mol_type = other DNA
caggtgcaactgcagcagtctgggcctcagctggttaggcctggggcttcagtgaagatatcctgcaaggcttctggttactcattcaccagctactggatgcactgggtgaagcagaggcctggacaaggtcttgagtggattggcatgattgatccttccgatagtgaaactaggttaaatcagaagttcaaggacaaggccacattgactgtagacaaatcctccagcacagcctacatgcaactcagcagcccgacatctgaggactctatagtctattactgtgcaaaggggagacccgactactggggccaaggcaccactctcacagtctcctca

SEQ ID NO: 608 - DNA, 354 bp, synthetic construct
  misc_feature 1..354: note = 849.4B2 VH DNA sequence
  source 1..354: mol_type = other DNA
gatggaaaacttcaggagtcaggacctggcctcgtgaaaccttctcagtctctgtctctcacctgctctgtcactggctactccatcaccagtggttattactggaactggatccggcagtttccaggaaacaaactggaatggatgggccacataagctacgatggtagaaataactacaacccatctctcaaaaatcgaatctccatcactcgtgacacatctaagaaccagtttttcctgaagttgaattctgtgactactgaggacacagccacatattactgtgcaggctatgatttcctctggtacttcgatgtctggggcacagggaccacggtcaccgtctcctca

SEQ ID NO: 609 - DNA, 363 bp, synthetic construct
  misc_feature 1..363: note = 849.4F12 VH DNA sequence
  source 1..363: mol_type = other DNA
caggtgcagctgaaggagtctggccctgggatattgcagccctcccagaccctcagtctgacttgttctttctctgggttttcactgagcacttttggtatgggtgtaggctggattcgtcagccttcagggaagggtctggagtggctggcacacatttggtgggatgatgataaacactataacccagccctgaagagccggctcacaatctccaaggatacctccaaaaaccaggtcttcctcaggatcgccaatgtggacactgcagataatgccacatattactgtgctcgaatcgactatggtgactacgtcgggtttgcttattggggccaagggactctggtcactgtctctgca

SEQ ID NO: 610 - DNA, 354 bp, synthetic construct
  misc_feature 1..354: note = 849.4F2 VH DNA sequence
  source 1..354: mol_type = other DNA
gatggacagcttcaggagtcaggacctggcctcgtgaaaccttctcagtctctgtctctcacctgctctgtcactggctactccatcaccagtggttattactggaactggatccggcagtttccaggaaacaaactggaatggatgggccacataagctacgatggtagaaataactacaacccatctctcaaaaatcgaatctccatcactcgtgacacatctaagaaccagtttttcctgaagttgaattctgtgactactgaggacacagccacatattactgtgcaggctatgatttcctctggtacttcgatgtctggggcacagggaccacggtcaccgtctcctca

SEQ ID NO: 611 - DNA, 357 bp, synthetic construct
  misc_feature 1..357: note = 849.5C2 VH DNA sequence
  source 1..357: mol_type = other DNA
gaggttcagctgcagcagtctggggcagagcttgtgaagtcaggggcctcagtcaagttgtcctgcacagcttctggcttcaacattaaagactactatatgcactgggtgaagcagaggactgaacagggcctggagtggattggaaggatttatcctgaggatgatgaaactaaatatgccccgaaattccagggcaaggccactataacagcagacacatcctccaacacagcctacctgcagctcagcagcctgacatctgaggacactgccgtctattactgtgctagatcagggggttactacgtttggtttgcttactggggccaagggactctggtcactgtctctgca

SEQ ID NO: 612 - DNA, 363 bp, synthetic construct
  misc_feature 1..363: note = 849.8D12 VH DNA sequence
  source 1..363: mol_type = other DNA
gaggtccagctacaacagtctggacctgagctggtgaagcctgggtcttcagtgaagatatcctgcaaggcttctagatacacattcactgactacaacatggactgggtgaagcagagccatggaaagagacttgagtggattggatatatttatcctaacaatggtggtactggctacaaccagaagttcaagggcaaggccacattgactgtagacaagtcctccagcacagcctacatggagctccgcagcctgacatctgaggactctgcagtctattactgtgcaaggtcctactacgatggtagctacgatgctatggactactggggtcaaggaacctcagtcaccgtctcctca

SEQ ID NO: 613 - DNA, 342 bp, synthetic construct
  misc_feature 1..342: note = F847C.21H6 VH DNA sequence
  source 1..342: mol_type = other DNA
cagatccagttggtgcagtctggacctgagctgaagaagcctggagagacagtcaagatctcctgcaaggcttctgggtataccttcacaatctttggaatgaactgggtgaagcaggctccaggaaagggtttaaagtggatgggctgggtaaacacctacactggagagccaacatatgctgatgacttcaagggacggtttgccttctctttggaaacctctgccagcactgcctatttgcagatcaacaacctcaaaaatgaggacacggctacatatttctgtgcaagaggctggtttgcttactggggccaagggactctggtcactgtctctgca

SEQ ID NO: 614 - DNA, 360 bp, synthetic construct
  misc_feature 1..360: note = 849.5H1 VH DNA sequence
  source 1..360: mol_type = other DNA
caggtgcagctgaaggagtcaggacctgtcctggtggcgccctcacagagcctgtccatcacttgcactgtctctgggttttcattaaccagttatggtatacactgggttcgccagcctccaggaaagggtctggagtggctgggagtaatatgggctggtggaagcacaaattataattcagctctcatgtccagactgagcatcagcaaagacaactccaagagccaagttttcttaaaaatgaacagtctgcaaattgatgacacagccatgtactattgtgccaaacccccccatgattacgaccaggcctggtttgcttactggggccaagggactctgatcactgtctctgca

SEQ ID NO: 615 - DNA, 348 bp, synthetic construct
  misc_feature 1..348: note = 847.23F11 VH DNA sequence
  source 1..348: mol_type = other DNA
caggtccagctgcagcagtctggggctgagctggtgaggcctggggcttcagtgaagctgtcctgcaaggcttctggctacaccttcaccagctcctggatgaactgggtgaaacagaggcctggacaaggccttgactggattggtatgattgatccttcagacagtgaaactcactacaatcaaatgttcaaggacaaggccacattgactgtagacaaatcctctaacacagcctacatgcagctcagcaggctgacatctgaggactcagcggtctattactgtgtaaatagtaactacgagagtggctattggggccaaggcaccactctcacagtctcctca

SEQ ID NO: 616 - DNA, 348 bp, synthetic construct
  misc_feature 1..348: note = 847.16D10 VH DNA sequence
  source 1..348: mol_type = other DNA
caggtccagctgcagcagtctggggctgagctggtgaggcctggggcttcagtgaagctgtcctgcaaggcttctggctacaccttcaccggctactggttgaactgggtgaagcagaggcctggacaaggcctggaatggattggtatgattgatccttcagacagtgaaactcactacaatcaagtgttcaaggacaaggccacaatgactgtagacaggtcctccagcacagcctacatgcagctcagcggactgacatctgaggactctgcggtctattactgtgcaaatagtaactacgcgagtggctcctggggccagggcaccactctcacagtctcctca

SEQ ID NO: 617 - DNA, 360 bp, synthetic construct
  misc_feature 1..360: note = 847.13E2-mH0mL1 VH DNA sequence
  source 1..360: mol_type = other DNA
gaggtccagcttcagcagtctggacctgagctggtgaagcctggggcttcagtgaaggtttcctgcaaggcttctggttactcattcactgactacaacatgtactgggtgatgcagagccatggaaagagccttgagtggattggatatattgatccttacaatgatgctactagctacagccagaagttcacgggcaaggccacattgactgttgacaagtcctccagcacagccttcatgcatctcaacagcctgacatctgaggactctgcagtctattactgtgcaagatgggggaggtacgaatactatgctatggactattggggtcaaggaacctcagtcaccgtctcctca

SEQ ID NO: 618 - DNA, 360 bp, synthetic construct; identical to SEQ ID NO: 617
  misc_feature 1..360: note = 847.13E2-mH0mL2 VH DNA sequence
  source 1..360: mol_type = other DNA

SEQ ID NO: 619 - DNA, 345 bp, synthetic construct
  misc_feature 1..345: note = 847.12C4 VH DNA sequence
  source 1..345: mol_type = other DNA
caggtacagctgaaggagtcaggacctgaccttgtgcagccctcacagaccctgtctctcacctgcactgtctctgggttctcattaaccatctatggtgttcactgggttcgccagcctccaggaaagggactggagtgggtgggaacagtggcctgggatgacaaaaaatattataattcacctctacaatctcgactgagcatcagcagggatacctccaagaaccaagttttcttaaaactgagcagtctgcaaactgaagacacagccatgtactactgtactatgactgggggccctataaactactggggtccaggaacctcagtcaccgtctcctca

SEQ ID NO: 620 - DNA, 351 bp, synthetic construct
  misc_feature 1..351: note = 847.4D3 VH DNA sequence
  source 1..351: mol_type = other DNA
gaggtgcagctggtggagtctgggggaggcttagtgaagcctggagggtccctgaaactctcctgtgcagcctctggattcactttcagtagctatgccatgtcttgggttcgccagactccagagaagaggctggagtgggtcgcatccattagtagtggtgatagcccctactatccagacagtgtgaagggccgcttcaccatctccagagataatgccaggaacatcctgtacctgcaaatgagcagtctgaggtctgaggacacggccatgtattactgtacaaggtttactacggtagtagagatggactactggggtcaaggaacctcagtcaccgtctcctca

SEQ ID NO: 621 - DNA, 336 bp, synthetic construct
  misc_feature 1..336: note = TB001 VL DNA sequence
  source 1..336: mol_type = other DNA
gacatcgtgctgacccagtctccactgagcctgcctgttacacctggcgagccagcctccatctcctgcagatcctctaagtccctgctgtacaaggacggcaagacctacctgaactggttcctgcagaagcccggccagtctcctcagctcctgatctacctgatgagcacccatgcctctggcgtgcccgatagattttccggctctggctctggcaccgacttcaccctgaagatctccagagtggaagccgaggacgtgggcgtgtactactgtcagcagctggtggactaccctctgacctttggcggcggaacaaagctggaaatcaag

SEQ ID NO: 622 - DNA, 336 bp, synthetic construct
  misc_feature 1..336: note = TB006 VL DNA sequence
  source 1..336: mol_type = other DNA
gatatagtgatgacccaaacacctttgtccctgtcagtcaccccaggccaacccgcatctatctcatgcaaatcctcaaaaagtcttttgcactctgacgggataacatatctctactggtatcttcaaaaacctggtcagtccccccagctcttgatctatagaatgagtaaccttgcctctggtgtccccgaccggtttagtggaagcgggtctgggaccgacttcaccctcaagattagtcgcgtcgaagccgaagatgtgggagtgtattactgtgcccagatgctcgaatttcccctgacatttggtcaaggaactaaattggagattaag

SEQ ID NO: 623 - DNA, 321 bp, synthetic construct
  misc_feature 1..321: note = 12G5.D7 VL DNA sequence
  source 1..321: mol_type = other DNA
gacatcctgatgacccaatctccatcctccatgtctgtatctctgggagacacagtcagcatcacttgccatgcaagtcagggcattaactctaatatggggtggttgcagcagaaaccagggaaatcatttaagggcctgatctatcatgcaaccaacttggaagatggagttccatcaaggttcagtggcagtggatctggagcagattattctctcaccatcagcagcctggaatctgaagattttgcagactattactgtgtacagtatgctcagtttcctcctacgttcggatcggggaccaagctggaaataaaa

SEQ ID NO: 624 - DNA, 336 bp, synthetic construct
  misc_feature 1..336: note = 13A12.2E5 VL DNA sequence
  source 1..336: mol_type = other DNA
gatgttgtgatgacccagactccactcactttgtcggttgccattggacaaccagcttccatctcttgcaagtcgagtcagagcctcttatatactaatggaaaaacctatttgaattggttattacagaggccaggccagtctccaaaacgcctaatctatctgctgtctaaattggactctggagtccctgacaggttcagtgccagtggatcagggacagatttcacactgaaaatcagcagagtggaggctgaggatttgggagtttattactgcttgcagagtacacattttccgctcacgttcggtgctgggaccaagctggagatgaaa

SEQ ID NO: 625 - DNA, 336 bp, synthetic construct
  misc_feature 1..336: note = 14H10.2C9 VL DNA sequence
  source 1..336: mol_type = other DNA
gatgttgtgatgacccagactccactcactttgtcggttaccattggacaaccagcctccatctcttgcaagtcaagtcagagcctcttcgatagtgatggaaagacatatttgaattggttgttacagaggccaggccagtctccaaagcgcctaatctatctggtgtctaaactggactctggagtccctgacaggttcactggcagtggatcagggacagatttcacactgaaaatcagcagagtggaggctgaggatttgggagtttattattgctggcaaggtacacattttcctctcacgttcggtgctgggaccaagctggaaatgaaa

SEQ ID NO: 626 - DNA, 336 bp, synthetic construct
  misc_feature 1..336: note = 15F10.2D6 VL DNA sequence
  source 1..336: mol_type = other DNA
gatgttttgatgacccaaactccactctccctgcctgtcagtcttggagatcaagcctccatctcttgcagatctagtcagagcattgtacataataatggaaacacctatttagaatggtacctgcagaaaccaggccagtctccaaaactcctgatctacaaagtttccaaccgattttctggggtcccagacaggttcagtggcagtggatcagggacagatttcacactcaagatcagcagagtggaggctgaggatctgggagtttattactgctttcaaggttcacatgttccgctcacgttcggtggtgggaccaagttggagctgaaa

SEQ ID NO: 627 - DNA, 321 bp, synthetic construct
  misc_feature 1..321: note = 19B5.2E6 VL DNA sequence
  source 1..321: mol_type = other DNA
gatatacaaatgactcaaactacctcttctctttccgcatctttgggtgatcgggtcactatatcctgctccgcctctcaaggcataaacaattacctgaattggtatcagcaaaaaccagacggaactgtaaaattgcttatctactacgcttcaagtctgcatagtggggttcccagcagattttccggttccgggtccggcactgattattctctcacaattagtaacctggaacctgaggacattgcaacttattactgtcaacaatacagtcaggtaccttacactttcggatcaggaacaaagttggaaatcaag

SEQ ID NO: 628 - DNA, 321 bp, synthetic construct
  misc_feature 1..321: note = 20D11.2C6 VL DNA sequence
  source 1..321: mol_type = other DNA
gacatccagatgaaccagtctccatccagtctgtctgcatccctcggagacacaattaccatcacttgccgtgccagtcagaacatttatatttggttaagttggtaccagcagaaaccaggaaatattcctaaactcttgatctataaggcttccaacttgcacacaggcgtcccatcaaggtttagtggcagtggatctggaacagatttcacattaaccatcagcactctgcagcctgaagacattgccacttacttctgtctccagggtcaaagttatcctctcacgttcggtgctgggaccaagctggagatgaaa

SEQ ID NO: 629 - DNA, 321 bp, synthetic construct
  misc_feature 1..321: note = 20H5.A3 VL DNA sequence
  source 1..321: mol_type = other DNA
gatatccagatgacacagactacatcctccctgtctgcctctctgggagacagagtcaccatcaattgcagtgcaagtcaggacattagcaattatttaaactggtatcagcagaaaccagatggaactgttaaactcctgatctattacacatcaagtttactctcaggagtcccatcaaggttcagtggcagtgggtctgggacagattattctctcaccatcagcaacctggaacctgaagatattgccacttacttttgtcagcaatatagtaagcttccctatacgttcggatcggggacccacctggaaataaaa

SEQ ID NO: 630 - DNA, 321 bp, synthetic construct
  misc_feature 1..321: note = 23H9.2E4 VL DNA sequence
  source 1..321: mol_type = other DNA
gatatccagatgacacagactacatcctccctgtctgcctctctgggagacagagtcaccatcagttgcagtgcaagtcagggcattaacaattatttaaactggtatcagcagaaaccagatggaactgttaaactcctgatctattacgcatcaagtttacactcaggagtcccatcaaggttcagtggcagtgggtctgggacagattattctctcaccatcagcaacctggaacctgaagatattgccacttactattgtcagcagtatagtcaggttccgtatacgttcggatcggggaccaagttggaaataaaa

SEQ ID NO: 631 - DNA, 336 bp, synthetic construct
  misc_feature 1..336: note = 2D10-VH0-VL0 VL DNA sequence
  source 1..336: mol_type = other DNA
gacatagtaatgacacaggccgcatttagcaatccagtaaccttgggcacatccgcctccatatcttgcaggtcatccaaaagcttgctgcactctgacggtattacttacctgtactggtatttgcagcgacctgggcaatcccctcaactcctgatttaccgcatgagcaacctggcctcaggggtgcctgaccgcttttcaggatcagggagcggcactgacttcaccttgcgaatcagcagagtagaagcagaggatgttggagtttactactgtgcccagatgatcgaatttccacttacttttggggccgggaccattctggagcttaaa

SEQ ID NO: 632 - DNA, 336 bp, synthetic construct
  misc_feature 1..336: note = 3B11.2G2 VL DNA sequence
  source 1..336: mol_type = other DNA
gatgttgtgatgacccagactccactcactttgtcggttgccattggacaaccagcttccatctcttgcaagtcgagtcagagcctcttatatactaatggaaaaacctatttgaattggttattacagaggccaggccagtctccaaaacgcctaatctatctggtgtctaaattggactctggagtccctgacaggttcagtggcagtggatcagggacagatttcacactgaaaatcagcagagtggaggctgaggatttgggagtttattactgcttgcagagtacacattttccgctcacgttcggtgctgggaccaagctggagctgaaa

SEQ ID NO: 633 - DNA, 336 bp, synthetic construct
  misc_feature 1..336: note = 7D8.2D8 VL DNA sequence
  source 1..336: mol_type = other DNA
gatgttttgatgacccaaactccactctccctgcctgtcagtcttggagatcaagcctccatctcttgcagatctagtcagagcattgtacatagtaatggaaacacctatttagaatggtacctgcagaaaccaggccagtctccaaagctcctgatctacaaagtttccaaccgattttctggggtcccagacaggttcagtggcagtggatcagggacagatttcacactcaagatcagcagagtggaggctgaggatctgggagtttattactgctttcaaggttcacatgttccgctcacgttcggtgctgggaccaagctggagctgaaa

SEQ ID NO: 634 - DNA, 336 bp, synthetic construct
  misc_feature 1..336: note = mIMT001 VL DNA sequence
  source 1..336: mol_type = other DNA
gatattgttattactcaggatgagcttagtaatcctgtcactagcggggaaagtgttagtatcagttgtcgttcatccaagtcactcctctacaaagacggcaagacttatctcaactggtttcttcaacgacccggtcaatctccacagctcctgatttacctgatgtcaactcacgcttctggtgttagcgaccgtttctccggaagtggctccgggacagacttcactcttgaaatctcacgtgtaaaagcagaggacgtaggtgtctattattgtcaacagcttgtggactaccccttgacctttggcgctggcacaaagctggaactgaag

SEQ ID NO: 635 - DNA, 336 bp, synthetic construct
  misc_feature 1..336: note = 4A11.2B5 VL DNA sequence
  source 1..336: mol_type = other DNA
gacattgtgatgactcaggcagccttttccaaccctgtaacacttggaactagtgcctccatctcatgccgttccagcaagagtcttttgcacagcgatgggataacctatctctattggtatctgcaacgacccggtcagtcaccccaacttcttatctatcgaatgtctaacttggcctccggcgtgcccgaccgcttttccgggagtgggagcggtacagatttcaccttgcgaatttcccgggttgaggcagaggacgtaggtgtctactattgtgctcagatgcttgagtttcctctcactttcggagccggcaccaaactggaactgaaa

SEQ ID NO: 636 - DNA, 336 bp, synthetic construct; identical to SEQ ID NO: 622
  misc_feature 1..336: note = 4A11.H1L1 VL DNA sequence
  source 1..336: mol_type = other DNA

SEQ ID NO: 637 - DNA, 336 bp, synthetic construct
  misc_feature 1..336: note = 4A11.H4L2 VL DNA sequence
  source 1..336: mol_type = other DNA
gatattgtaatgacccaaagccccctgtccttgcctgttaccccaggtgagcctgccagcatatcttgccgatccagtaaatctctgcttcatagcgatggcatcacctatttgtattggtatttgcagaagcccggccagagcccccagttgctgatctacagaatgtccaaccttgctagtggagtgcccgaccggtttagcggttcaggctcagggactgatttcactcttaaaatcagtagggtagaggccgaagacgttggtgtatattattgtgctcagatgttggagtttccactcacatttggacaaggtacaaagctggaaattaag

SEQ ID NO: 638 - DNA, 336 bp, synthetic construct
  misc_feature 1..336: note = 4G2.2G6 VL DNA sequence
  source 1..336: mol_type = other DNA
gatgtcgtaatgactcaaacccccctgacccttagtgttactataggccagcccgcaagcatctcctgcaaatcctcccagtctcttctttatactgatggcaaaacctacttgtcctggtttttgcagcgcccaggtcaaagtcctaaacgtcttatttacttggtctctaaactcgattccggcgtgcctgaccggttctccggtagcggtagcggtaccgatttcactttgaagattagccgagttgaggcagaagacctcggggtctactactgccttcagagtacacacttcccacttacatttggcgcaggaaccaagttggaggttaaa

SEQ ID NO: 639 - DNA, 321 bp, synthetic construct
  misc_feature 1..321: note = 6B3.2D3 VL DNA sequence
  source 1..321: mol_type = other DNA
agtattgtgatgacccagactcccaaattcctgcttgtatcagcaggagacagggttaccataacctgcaaggccagtcagagtgtgagtaatgatgtagcttggtaccaacagaagccagggcagtctcctaaattgttgatatattatgcatccaatcgctacactggagtccctgatcgcttcactggcagtggatatgggacggatttcactttcaccatcagcactgtgcaggctgaagacctggcagtttatttctgtcagcaggattatacctctccgtacacgttcggaggggggaccaagctggaaataaaa

SEQ ID NO: 640 - DNA, 321 bp, synthetic construct
  misc_feature 1..321: note = 6H6.2D6 VL DNA sequence
  source 1..321: mol_type = other DNA
gacatccagatgacccagaccacctcctccctgtccgcctccctgggcgacagggtgaccatctcctgctccgcctcccagggcatctccaactacctgaactggtaccagcagaagcccgacggcaccgtgaagctgctgatctactacacctcctccctgcactccggcgtgccctccaggttctccggctccggctccggcaccgactactccctgaccatctccaacctggagcccgaggacatcgccacctactactgccagcagtactccgagctgccctacaccttcggctccggcaccaagctggagatcaag

SEQ ID NO: 641 - DNA, 321 bp, synthetic construct
  misc_feature 1..321: note = 9H2.2H10 VL DNA sequence
  source 1..321: mol_type = other DNA
gacattgtgatgacccagtctcacaaattcatgtccacatcagtaggagacagggtcagcatcacctgcaaggccagtcaggatgtgagtactgctgtagcctggtatcaacaaaaaccagggcaatctcctaaactactgatttactgggcatccacccggcacactggagtccctgatcgcttcacaggcagtggatctgggacagattatactctcaccatcagcagtgtgcaggctgaagacctggcactttattactgtcagcaacattataccactccgctcacgttcggtgctgggaccaagctggagctgaaa

SEQ ID NO: 642 - DNA, 321 bp, synthetic construct
  misc_feature 1..321: note = 13G4.2F8 VL DNA sequence
  source 1..321: mol_type = other DNA
gacattgtgatgacccagtctcaaaaattcatgtccacatcagtaggagagagggtcagcatcacctgcaaggccagtcagaatgtaggtactaatgtagcctggtatcagcagaaagcagggcagtctcttgaactgctgatctatggggcatccaaccggcacactggagtccctgatcgcttcacaggcagtggatctgggacagatttcactctcaccatcaccaatgtgcagtctgaagacatgacaaattatttctgtgagcaatatagcaactttcctctcacgttcggtgctgggaccaagctggagctgaaa

SEQ ID NO: 643 - DNA, 336 bp, synthetic construct
  misc_feature 1..336: note = 13H12.2F8 VL DNA sequence
  source 1..336: mol_type = other DNA
gacgttgttatgacacaaacaccacttacactttctgtaactatcggtcagcctgcctcaatttcatgtaagtcttctcagtccctgtttcatagcgacgggaagacttacctgaattggcttctccaacgaccaggccaatcacccaagcgccttatttatttggtcagtaaattggacagtggagttcccgatagatttaccgggagcggttctgggaccgatttcaccccaaagatctccagggtagaagacgaagatctcggtgtgtactattgctggcaggggacacatttccctctgacattcggtgctggaaccaaacttgagatgaaa

SEQ ID NO: 644 - DNA, 321 bp, synthetic construct
  misc_feature 1..321: note = 15G7.2A7 VL DNA sequence
  source 1..321: mol_type = other DNA
gacatccagatgaaccagtctccatccagtctgtctgcatccctcggagacacaatttccatcacttgccgtgccagtcagaacattaatatttggttaagctggtaccagcagaaaccaggaaatattcctcaactattgatctataaggcttccaacttgcacacaggcgtcccctcaaggtttagtggcagtggatctggaacagatttcacattaaccatcagcagtctgcagcctgaagacattgccacttactactgtctacagggtcaaagttatcctctcacgttcggtgctgggaccaagctggtgatgaaa

SEQ ID NO: 645 - DNA, 330 bp, synthetic construct
  misc_feature 1..330: note = 19D9.2E5 VL DNA sequence
  source 1..330: mol_type = other DNA
gatgttgtgatgacccagactccactcactttgtcggttaccattggacaaccagcctccatctcttgtaagtcaagtcagagcctcttacatagtgatggaaagacatatttgaattggttgttacagaggccaggccagcctccaaagcgcctaatgtatctggtgtctacactggactctggagtccctgacaggttcactggcagtggatcagggacagatttcacactgaaaatcagcagagtggaggctgaggatttgggagtttattattgctggcaaggtacacattttcctctcacgttcggtgctgggaccaagccggag

SEQ ID NO: 646 - DNA, 330 bp, synthetic construct
  misc_feature 1..330: note = 23B10.2B12 VL DNA sequence
  source 1..330: mol_type = other DNA
gatattgtgatgacgcaggctgcattctccaatccagtcactcttggaacgtcagcttccatctcctgcaggtctagtaagagtctcctacatagtgatggcatcacttatttctattggtatctgcagaggccaggccagtctcctcagctcctgatatatcggatgtccaaccttgcctcaggagtcccagacaggttcagtggcagtgggtcaggaactgatttcacactgagaatcagcagagtggaggctgaggatgtgggtgtttattactgtgctcaaatgctagaattcccgctcacgttcggtgctgggaccaagctggag

SEQ ID NO: 647 - DNA, 321 bp, synthetic construct
  misc_feature 1..321: note = 24D12.2H9 VL DNA sequence
  source 1..321: mol_type = other DNA
gacattgtgatgacccagtctcacaaattcatgtccacatcagtaggagacagggtcagcatcacctgcaaggccagtcaggatgtgcgtactgctgtagcctggtatcaacagaaaccagggcaatctcctaaactactgatttactgggcatccacccggcacactggagtccctgatcgcttcacaggcagtggatctgggacagatttcactctcacccttagcaatgtgcagtctgaagacttggcagattatttctgtcagcaatatagtagttatccgtggacgttcggtggaggcaccaagctggaaatcaaa

SEQ ID NO: 648 - DNA, 336 bp, synthetic construct
  misc_feature 1..336: note = F846C.1B2 VL DNA sequence
  source 1..336: mol_type = other DNA
aacatttggttgacacagtcgccatcatctctggctgtgtctgcaggagaaatggtcactatgacctgtaagtccagtcaaagtgttttatacagttcaaatcagaagaactacttggcctggtaccagcagaaaccagggcagtctcctaaactgctgatctactgggcatccactagggaatctggtgtccctgatcgcttcacaggcagtggatctgggacagacttttctcttaccatcagcagtgtacaagctgaagacctggcagtttattactgtcatcaatatctctcctcgctcacgttcggtgctgggaccaagctggagctgaaa

SEQ ID NO: 649 - DNA, 336 bp, synthetic construct
  misc_feature 1..336: note = F846C.1F5 VL DNA sequence
  source 1..336: mol_type = other DNA
aacattatgatgacacagtcgccatcatctctggctgtgtctgcaggagaaaaggtcactatgagctgtaagtccagtcaaagtgttttatacagttcaaatcagaagaactacttggcctggtaccagcagaaaccagggcagtctcctaaactgctgatctactgggcatccactagggaatctggtgtccctgatcgcttcacaggcagtggatctgggacagattttactcttaccatcagcagtgtacaacctgaagacctggcagtttattactgtcatcaatacctctcctcgctcacgttcggtgctgggaccaagctggagctgaaa

SEQ ID NO: 650 - DNA, 336 bp, synthetic construct
  misc_feature 1..336: note = F846C.1H12 VL DNA sequence
  source 1..336: mol_type = other DNA
aacattatgatgacacagtcgccatcatctctggctgtgtctgcaggacaaaaggtcactatgagctgtaagtccagtcaaagtgttttatacagttcaagtcagaagaactacttggcctggtaccagcagaaaccagggcagtctcctaaacttctgatctactgggcatccactagggaatctggtgtccctgatcgcttctcaggcagtggatctgggacagattttactcttaccatcagcagtgtacaacctgaagacctggcagtttattactgtcatcaatacctctcctcgctcacgttcggtgctgggaccaagctggagctgaaa

SEQ ID NO: 651 - DNA, 336 bp, synthetic construct
  misc_feature 1..336: note = F846C.1H5 VL DNA sequence
  source 1..336: mol_type = other DNA
gatgttgtgatgacccaaactccactctccctgcctgtcagtcttggagatcaagcctccatctcttgcagatctagtcagagccttgtacacaatagtggaaacacctatttacattggtacctgcagaggccaggccagtctccaaacctcctgatctacaaagtttccaaccgattttctggggtcccagacaggttcagtggcagtggatcagggacagatttcacactcaagatcagcagagtggcggctgaggatctgggagtttatttctgctctcaaagtacacatgttcctccgacgttcggtggaggcaccaagctggaaatcaaa

SEQ ID NO: 652 - DNA, 336 bp, synthetic construct; identical to SEQ ID NO: 649
  misc_feature 1..336: note = F846C.2H3 VL DNA sequence
  source 1..336: mol_type = other DNA

SEQ ID NO: 653 - DNA, 327 bp, synthetic construct
  misc_feature 1..327: note = F846TC.14A2 VL DNA sequence
  source 1..327: mol_type = other DNA
caggctgttgtgactcaggaatctgcactcaccacatcacctggtgaaacagtcacactcacttgtcgctcaagtactggggctgttacaactagtaactatgccaactgggtccaagaaaaaccagatcatttattcactggtctaataggtggtatcaataaccgagttccaggtgttcctgccagattctcaggctccctgattggagacaaggcagccctcaccatcacaggggcacagactgaggatgaggcaatatatttctgtgctctatggtatagcaaccattgggtgttcggtggaggaaccaaactgactgtccta

SEQ ID NO: 654 - DNA, 336 bp, synthetic construct
  misc_feature 1..336: note = F846TC.14E4 VL DNA sequence
  source 1..336: mol_type = other DNA
gatattgtgatgacgcaggctgcattctccaatccagtcactcttggaacatcagcttccatctcctgcaggtctagtaagagtctcctacatactaatggcatcacttttttgtattggtatctgcagaagccaggccagtctcctcagcccctgatttatcagatgtccaaccttgcctcaggagtcccagacaggttcagtagcagtgggtcaggaactgatttcacactgagaatcagcagagtggaggctgaggatgtgggtgtttattactgtgctcaaaatctagaacttccttggacgttcggtggaggcaccaagctggaaatcaat

SEQ ID NO: 655 - DNA, 336 bp, synthetic construct
  misc_feature 1..336: note = F846TC.16B5 VL DNA sequence
  source 1..336: mol_type = other DNA
aacattatgatgacacagtcgccatcatctctggctgtgtctgcaggagaaaaggtcactatgagctgtaagtccagtcaaagtgttttatacagttcaaatcagaagaactacttggcctggtaccagcagaaaccagggcagtctcctaaactactgatctactgggcatccactagggaatctggtgtccctgatcgcttcacaggcagtggatctgggacagattttactcttaccatcagcagtgtacaagctgaagacctggcagtttattactgtcatcaatacctctcctcgctcacgttcggtgctgggaccaagctggagctgaaa

SEQ ID NO: 656 - DNA, 339 bp, synthetic construct
  misc_feature 1..339: note = F846TC.7F10 VL DNA sequence
  source 1..339: mol_type = other DNA
gacattgtgatgacacagtctccatcctccctggctatgtcagtaggacagaaggtcactatgagctgcaagtccagtcagagccttttaaatagtagcaatcaaaagaactatttggcctggtaccagcagaaaccaggacagtctcctaaacttctggtatactttgcatccactagggaatctggggtccctgatcgcttcataggcagtggatctgggacagatttcactcttaccatcagcagtgtgcaggctgaagacctggcagattacttctgtcagcaacattatagcactccgtacacgttcggagggggggccaagctggaaataaaa

SEQ ID NO: 657 - DNA, 321 bp, synthetic construct
  misc_feature 1..321: note = F847C.10B9 VL DNA sequence
  source 1..321: mol_type = other DNA
gacatccggatgactcagtctccatccagtctgtctgcatcccttggagacacaattaccatcacttgccatgccagtcagaacattaatgtttggttaagctggtaccagcagaaaccaggaaatattcctaaactattgatctataaggcttccaacttgcacacaggcgtcccatcaaggtttagtggcagtggatctggaacaggtttcacattaaccatcagcagcctgcagcctgaagacattgccacttactactgtcaacagggtcaaagttatccgtacacgttcggaggggggaccaagctggagctgaaa

SEQ ID NO: 658 - DNA, 321 bp, synthetic construct
  misc_feature 1..321: note = F847C.11B1 VL DNA sequence
  source 1..321: mol_type = other DNA
gaaattgtgttgacccagtctccagcatccctgtccgtgactacaggagaaaaagtcactatcagatgcataaccagcattgatattgatgatgatatgaactggtaccagcagaagccaggggaacctcctaagctccttatttcagaaggcaatactcttcgtcctggagtcccatcccgattctccagcagtggctatggcacagattttgtttttacaattgaaaacacgctctcagaagatgttgcagattactactgtttgcaaagtgataacaagcctctcacgttcggtgctgggaccaagctggagctgaaa

SEQ ID NO: 659 - DNA, 321 bp, synthetic construct
  misc_feature 1..321: note = F847C.12F12 VL DNA sequence
  source 1..321: mol_type = other DNA
gacatccaggtgattcagtctccatccagtctgtctgcatcccttggagacacaattaccatcacttgccatgccagtcagaacattaatgtttggttaagctggtaccagcagaaaccaggaaatattcctaaactattgatctataaggcttccaacttgcacacaggcgtcccatcaaggtttagtggcagtggatctggaacaggtttcacattaaccatcagcagcctgcagcctgaagacattgccacttactactgtcaacagggtcaaagttatccgtacacgttcggaggggggaccaagctggagctgaaa

SEQ ID NO: 660 - DNA, 321 bp, synthetic construct
  misc_feature 1..321: note = F847C.26F5 VL DNA sequence
  source 1..321: mol_type = other DNA
gaaattaagatgaaccagtctccatccagtctgtctgcatcccttggagacacaattaccatcacttgccatgccagtcagaacattaatgtttggttaagctggtaccagcagaaaccaggaaatattcctaaactattgatctataaggcttccaacttgcacacaggcgtcccatcaaggtttagtggcagtggatctggaacaggtttcacattaaccatcagcagcctacagcctgaagacattgccacttactactgtcaacagggtcaaagttatccgtacacgttcggaggggggaccaagctggagctgaaa

SEQ ID NO: 661 - DNA, 327 bp, synthetic construct
  misc_feature 1..327: note = F847C.4B10 VL DNA sequence
  source 1..327: mol_type = other DNA
caggctgttgtgactcaggaatctgcactcaccacatcacctggtgaaacagtcacactcacttgtcgctcaagtactggggctgttacaactagtaactatgccaactgggtccaagaaaaaccagatcatttattcactggtctaataggtggtaccaacaaccgagctccaggtgttcctgccagattctcaggctccctgattggagacaaggctgccctcaccatcacaggggcacagactgaggatgaggcaatatatttctgtgctctatggtacagcaaccatttagtgttcggtggaggaaccaaactgactgtccta

SEQ ID NO: 662 - DNA, 336 bp, synthetic construct
  misc_feature 1..336: note = F849C.8D10 VL DNA sequence
  source 1..336: mol_type = other DNA
gatgttttgatgacccaaactccactctccctgcctgtcagtcttggagatcaagcctccatctcttgcagatctagtcaggacattgtgcatagtagtggaaacacctatttagaatggtacctgcagaaaccaggccagtctctaaagctcctgatttacaaagtttccaaccgattttctggggtcccagacaggttcagtgccagtggatcagggacagatttcacactcaagatcagcagagtggaggctgaggatctgggagtttattactgctttcaaggttcacatgttcctcccacgttcggctcggggacaaagttggaaataaaa

SEQ ID NO: 663 - DNA, 336 bp, synthetic construct
  misc_feature 1..336: note = F849C.8H3 VL DNA sequence
  source 1..336: mol_type = other DNA
gatattgggatgaggcaggctgcattctccaatccagtcactcttggaacatcagcttccatctcctgcaggtctagtaagagtctcctatatagtaatggcatcacttatttgtattggtttctccagaagccaggccagtctcctcagctcctgatttatcagatgtccaaccttgcctcaggagtcccagacaggttcagtagcagtgggtcaggaactgatttcacactgagaatcagcagagtggaggctgacgatgtgggtgtttattactgtgctcaaaatctagaacttccgtggacgttcggtggaggcaccaagctggaaatcaaa

SEQ ID NO: 664 - DNA, 333 bp, synthetic construct
  misc_feature 1..333: note = 846.2B11 VL DNA sequence
  source 1..333: mol_type = other DNA
gacattgtgctgacacagtctcctgcttccttaggtgtttctctggggcagagggccaccatctcatgcagggccagcaaaagtgtcagtacatctggctatagttatatgcactggtaccaacagaaaccaggacagccacccaaactcctcatctatcttgcatccatcctagaatctggggtccctgccaggttcagtggcagtgggtctgggacagacttcaccctcaacatccatcctgtggaggaggaggatgctgcaatctattactgtcagcacagtagggagcttcctctcacgttcggtgctgggaccaagctggagctgaaa

SEQ ID NO: 665 - DNA, 333 bp, synthetic construct
  misc_feature 1..333: note = 846.4D5 VL DNA sequence
  source 1..333: mol_type = other DNA
aacattgtgctgacccaatctccagcttctttggctgtgtctctagggcagagggccaccatatcctgcagagccagtgaaagtgttgatagttatggcaatagttttatgcactggtaccagcagaaaccaggacagccacccaaactcctcatctatcttgcatccaacctagaatctggggtccctgccaggttcagtggcagtgggtctaggacagacttcaccctcaccattgatcctgtggaggctgatgatgctgcaacctattactgtcagcaaaataatgaggatccgtggacgttcggtggaggcaccaagctggaaatcaaa

SEQ ID NO: 666 - DNA, 336 bp, synthetic construct
  misc_feature 1..336: note = 846T.1H2 VL DNA sequence
  source 1..336: mol_type = other DNA
gatgttgtgatgacccagactccactcactttgtcggttaccattggacaaccagcctctatctcttgcaagtcaagtcagagtctcttatatagtaatggaaaaacctatttgaattggttattacagaggccaggccagtctccaaagcgcctaatctatctggtgtctaaactggactctggagtccctgacaggttcactggcagtggatcaggaacagattttacactgaaaatcagcagagtggaggctgaggatttgggagtttattactgcgtgcaaggtacacattttcctcagacgttcggtggaggcaccaagctggaaataaaa

SEQ ID NO: 667 - DNA, 327 bp, synthetic construct; identical to SEQ ID NO: 661
  misc_feature 1..327: note = 847.14H4 VL DNA sequence
  source 1..327: mol_type = other DNA

SEQ ID NO: 668 - DNA, 333 bp, synthetic construct
  misc_feature 1..333: note = 846.2D4 VL DNA sequence
  source 1..333: mol_type = other DNA
aacattgtgctcacccaatctccagcttctttggctgtgtctctagggcagagggccaccatatcctgcagagccagtgaaagtgttgatagttatggcaatagttttatgcactggtaccagcagaaaccaggacagccacccaaactcctcatctatcttgcatccaacctagaatctggggtccctgccaggttcagtggcagtgggtctaggacagacttcaccctcaccattgatcctgtggaggctgatgatgctgcaacctattactgtcagcaaaataatgaggatccgtggacgttcggtggaggcaccaagctggaaataaaa

SEQ ID NO: 669 - DNA, 321 bp, synthetic construct
  misc_feature 1..321: note = 846.2F11 VL DNA sequence
  source 1..321: mol_type = other DNA
gacatcctgatgacccaatctccatcctccatgtctgtatctctgggagacacagtcagcatcacttgccatgcaagtcagggcattaacagtaatatagggtggttgcagcagaaaccagggaagtcatttaagggcctgatctatcatggaaccaacttggaagatggagttccatcaaggttcagtggcagtggatctggagcagattattctctcaccatcagcagcctggaatctgaagattttgcggactattactgtgtacagtatgatcagtttccgtggacgttcggtggaggcaccaagctggaaatcaaa

SEQ ID NO: 670 - DNA, 333 bp, synthetic construct
  misc_feature 1..333: note = 846T.10B1 VL DNA sequence
  source 1..333: mol_type = other DNA
gacattgtgatgtcacagtctcctgcttccttaggtgtttctctggggcagagggccaccatctcatgcagggccagcaaaagtgtcagtacatctggctatagttatatgcactggtaccaacagaaaccaggacagccacccaaactcctcatctatcttgcatccatcctagaatctggggtccctgccaggttcagtggcagtgggtctgggacagacttcaccctcaacatccatcctgtggaggaggaggatgctgcaatctattactgtcagcacagtagggagcttcctctcacgttcggtgctgggaccaagctggagctgaaa

SEQ ID NO: 671 - DNA, 333 bp, synthetic construct
  misc_feature 1..333: note = 846T.2E3 VL DNA sequence
  source 1..333: mol_type = other DNA
gacattgtgctgacacagtctcctgcttccttagctgtatctctggggcagagggccaccatctcatgcagggccagcaaaagtgtcagtacatctggctatagttatatgcactggtaccaacagaaaccaggacagccacccaaactcctcatctatcttgcatccatcctagaatctggggtccctgccaggttcagtggcagtgggtctgggacagacttcaccctcaacatccatcctgtggaggaggaggatgctgcaacctattactgtcagcacagtagggagcttcctctcacgttcggtgctgggaccaagctggagctgaaa

SEQ ID NO: 672 - DNA, 321 bp, synthetic construct
  misc_feature 1..321: note = 846T.4C9 VL DNA sequence
  source 1..321: mol_type = other DNA
gacattttgatgacccaaactccatcctccatgtctgtatctctgggagacacagtcagcatcacttgccatgcaagtcagggcattagcagtaatatagggtggttgcagcagaaaccacggaaatcatttaagggcctgatctattatggaaccaacttggaagatggagttccatcaaggttcagtggcagtggatctggagcagattattctctcaccatcagcagcctggaatctgaagattttgcagactattactgtgtacagtatgatcagtttccgtggacgttcggtggaggcaccaagctggaaataaaa

SEQ ID NO: 673 - DNA, 333 bp, synthetic construct
  misc_feature 1..333: note = 846T.4E11 VL DNA sequence
  source 1..333: mol_type = other DNA
gacattgtgctgacacagtctcctgcttccttagctgtatctctggggcagagggccaccatctcatgcagggccagcaaaagtgtcagtacatctggctatagttgtatgcactggtaccaacagaaaccaggacagccacccaaactcctcatctatcttgcatccaacctagaatctggggtccctgccaggttcagtggcggtgggtctgggacagacttcaccctcagcatccatcctgtggaggaggaggatgctgcaacctattactgtcaccacagtacggagcttccgtacacgttcggaggggggaccaagctggaagtagaa

SEQ ID NO: 674 - DNA, 333 bp, synthetic construct
  misc_feature 1..333: note = 846T.4F5 VL DNA sequence
  source 1..333: mol_type = other DNA
gacattgtgctgacccaatctccagcttctttggctgtgtctctagggcagagggccaccatatcctgcagagccagtgaaagtgttgatagttatggcaatagttttatgcactggtaccagcagaaaccaggacagccacccaaactcctcatctatcttgcatccaacctagaatctggggtccctgccaggttcagtggcagtgggtctaggacagacttcaccctcaccattgatcctgtggaggctgatgatgctgcaacctattactgtcagcaaaataatgaggatccgtggacgttcggtggaggcaccaagctggaaatcaaa

SEQ ID NO: 675 - DNA, 324 bp, synthetic construct
  misc_feature 1..324: note = 846T.8D1 VL DNA sequence
  source 1..324: mol_type = other DNA
gacattgtgctgacacagtctcctgcttccttagctgtatctctggggcagagggccaccatctcatgcagggccagcaaaagtgtcagtacatctggctatagttatatgcactggtaccaacagaaaccaggacagccacccaaactcctcatctatcttgcatccatcctagaatctggggtccctgccaggttcagtggcagtgggtctgggacagacttcaccctcaacatccatcctgtggaggaggaggatgctgcaacctattactgtcagcacagtagggagcttcctctcacgttcggtgctgggaccaagctg

SEQ ID NO: 676 - DNA, 333 bp, synthetic construct
  misc_feature 1..333: note = 847.10C9 VL DNA sequence
  source 1..333: mol_type = other DNA
gatgttgtgatgacccagactccactcactttgtcggttaccattggacaaccagcctctatctcttgcaagtcaagtcagagcctcttatatagtgatggaaaaacctatttgaattggttattacagaggccaggccagtctccaaagcgcctaatctatctggtgtctcaactggactctggagtccctgacaggttcactggcagtggatcaggaacagattttacactgaaaatcagcagagtggaggctgatgatttgggagtttattgctgcgtgcaaggtacacatcttcccacgttcggaggggggaccaagctggaaataaaa

SEQ ID NO: 677 - DNA, 333 bp, synthetic construct
  misc_feature 1..333: note = 847.11D6 VL DNA sequence
  source 1..333: mol_type = other DNA
gacattgtgatgacacagtctcccgcttctttggctgtgtctctagggcagagggccaccatatcctgcagagccagtgaaagtgttgaaaatcatgtcaatagttttatgcactggttccaacagaaaccaggacagccacccaaactcctcatctatcgtgcatccaacctacaatctgggatccctgccaggttcagtggcagtgggtctaggacagacttcaccctcaccattaatcctgtggaggctgatgatgttgcaacctattactgtcagcaaaataatgaggtcccgtacacgttcggaggggggaccaagctggaaataaaa

SEQ ID NO: 678 - DNA, 327 bp, synthetic construct
  misc_feature 1..327: note = 847.15D12 VL DNA sequence
  source 1..327: mol_type = other DNA
caggctgttgtgactcaggaatctgcactcaccacatcacctggtgaaacagtcacactcacttgtcgctcaagtactggggctgttacaactagtaactatgccaactgggtccaagaaaaaccagatcatttattcactggtctaataggtggtaccaacaaccgagctccaggtgttcctgccagattctcaggctccctgattggagacaaggctgccctcaccatcacaggggcacagactgaggatgaggcaatatatttctgtgctctatggtacagcaaccatttggtgttcggtggaggaaccaaactgactgtccta

SEQ ID NO: 679 - DNA, 318 bp, synthetic construct
  misc_feature 1..318: note = 847.15F9 VL DNA sequence
  source 1..318: mol_type = other DNA
caaattgttctctcccagtctccagcaatcctgtctgcatctccaggggagaaggtcacaatgacttgcagggccagctcaagtgtaacttacatgtactggtaccagcagaagccaggatcctccccccaaccctggatttatgccacatccaacctggcttctggagtccctgctcgcttcagtggcagtgggtctgggacctcttactctctcacaatcagcagagtggaggctgaagatgctgccacttattactgccagcagtggagtagtaacccactcacgttcggtgctgggaccaagctggagctgaaa

SEQ ID NO: 680 - DNA, 333 bp, synthetic construct
  misc_feature 1..333: note = 847.15H11 VL DNA sequence
  source 1..333: mol_type = other DNA
gacattgtgctaacacagtctccagcttctttggctgtgtctctagggcagagggccaccatctcctgcagagccagcgaaagtcttgataattctggcattagttttatgaactggttccaacagagaccaggacagccacccaaactcctcatctatgctgcatccaacctagaatccggggtccctgccaggtttagtggcagtgggtctgggacagacttcagcctcaacatccatcctatggaggaggatgatgctgcaatgtatttctgtcagcacagtaaggaggttccgtggacgttcggtggaggcaccaagctggaaatcaaa

SEQ ID NO: 681 - DNA, 321 bp, synthetic construct
  misc_feature 1..321: note = 847.20H7 VL DNA sequence
  source 1..321: mol_type = other DNA
gacattgtgatgacccagtctcacaaaatcatgtccacatcagtaggagacagggtcagcatcacctgcaaggccagtcaggatgtgagtaccactgtggcctggtttcagcaaaaaccaggacaatctcctaaactactgctttactgggcatccacccggcacactggagtccctgatcgcttcacaggcagtggatctgggacagattatactctcaccatcagcagtgtccaggctgaagacctggcactttattactgtcagcaacattatagccctccattcacgttcggctcggggaccaagctggaaataaaa

SEQ ID NO: 682 - DNA, 321 bp, synthetic construct
  misc_feature 1..321: note = 847.21B11 VL DNA sequence
  source 1..321: mol_type = other DNA
gacattgtgatgactcagtctcaaaaattcatgtccacatcagtaggagacagggtcagcgtcacctgcaaggccagtcagaatgtgggtattaatgtagcctggtatcaacagaaaccagggcaatctcctaaagcactgatttactcggcatcctaccggtacagtggagtccctgatcgcttcacaggcagtggatctgggacagatttcactctcaccatcagcaatgtgcagtctgaagacttggcagagtatttctgtcagcaatataatagttatccgtacacgttcggaggggggaccaagctggaaatgaaa

SEQ ID NO: 683 - DNA, 336 bp, synthetic construct
  misc_feature 1..336: note = 847.27B9 VL DNA sequence
  source 1..336: mol_type = other DNA
gacgttgtgatgacccagactccactcactttgtcggttacccttggacaacccgcctccatctcttgcaggtcaagtcagagcctcttagatagtgatggaaagacatatttgaattggttgttacagaggccaggccagtctccaaagcgcctaatctatttggtgtctagactggactctggagtccctgacaggttcactggcagtggatcagggacagatttcacactgaaaatcagcagagtggaggctgaggatctgggagtttattattgctggcaaggtacacattttccgttcacgttcggaggggggaccaagctggaaataaaa

SEQ ID NO: 684 - DNA, 321 bp, synthetic construct
  misc_feature 1..321: note = 847.28D1 VL DNA sequence
  source 1..321: mol_type = other DNA
gacatccggatgactcagtctccagcctccctatctgcatctgtgggagaaactgtcaccatcacatgtcgagcaagtgggaatattcacaattatttagcatggtatcatcagaaacagggaaaatctcctcagctcctggtctataatgtaaaaaccttagcagatggtgtgccatcaaggttcagtggcagtggatcaggaacacaattttctctcaagatcaacagtttgcagcctgaagattttgggacttattattgtcaacatttttggagtatttttccgacgttcggtggaggcaccaagctggaaataaaa

SEQ ID NO: 685 - DNA, 318 bp, synthetic construct
  misc_feature 1..318: note = 847.2B8 VL DNA sequence
  source 1..318: mol_type = other DNA
caaattcttctctcccagtctccagcaatcctgtctgcatctccaggggagaaggtcacaatgacttgcagggccagctcaagtgtaacttacatgtactggtaccagcagaagccaggatcctccccccaaccctggatttatgccacatccaacctggcttctggagtccctgctcgcttcagtggcagtgggtctgggacctcttactctctcacaatcagcagagtggaggctgaagatgctgccacttattactgccagcagtggagtagtaacccactcacgttcggtgctgggaccaagctggagctgaaa

SEQ ID NO: 686 - DNA, 315 bp, synthetic construct
  misc_feature 1..315: note = 847.3B3 VL DNA sequence
  source 1..315: mol_type = other DNA
gacattttgatgactcagtctccagcctccctatctgcatctgtgggagaaactgtcaccatcacatgtcgagcaagtgggaatattcacaattatttagcatggtatcagcagaaacagggaaaatctcctcaactcctggtctatagtgcaaaaaccttagcagatggtgtgccatcaaggttcagtggcagtggatcaggaacacaattttctctcaagatcgacagcctgcagcctgaagattttgggacttattactgtcaacatttttggagtctttttccgacgttcggtggaggcaccaagctggaa

SEQ ID NO: 687 - DNA, 321 bp, synthetic construct
  misc_feature 1..321: note = 849.1D2 VL DNA sequence
  source 1..321: mol_type = other DNA
gacgttgtgatgacccagactcccaaattcctgcttgtatcagcaggagacagggttaccataacctgcaaggccagtcaaagtgtgagtagtgatgtagcttggtaccaacagaagccagggcagtctcctaaactgctgatatactttgcatccaatcgctacactggagtccctgatcgcttcactggcagtggatatgggacggatttcactttcaccatcagcactgtccaggctgaagacctggcagtttatttctgtcagcataattatatctctccgttcacgttcggaggggggaccaagctggaaataaaa

SEQ ID NO: 688 - DNA, 321 bp, synthetic construct
  misc_feature 1..321: note = 849.2D7 VL DNA sequence
  source 1..321: mol_type = other DNA
gacattgtgatgacccagtctcacaaattcatgtccacatcagtaggagacagggtcagcatcacctgcaaggccagtcaggatgtgagtactgctgtagcctggtatcaacaaaaaccagggcaatctcctaaactactgatttactgggcatccacccggcacactggagtccctgatcgcttcacaggcagtggatctgggacagattatactctcaccatcagcagtgtgcaggctgaagacctggcactttattactgtcagcaacattatagcactccgtacacgttcggaggggggaccaagctggaaataaaa

SEQ ID NO: 689 - DNA, 321 bp, synthetic construct
  misc_feature 1..321: note = 849.2F12 VL DNA sequence
  source 1..321: mol_type = other DNA
gacattgcgatgacccagtctcacaaattcatgtccacatcagtaggagacagggtcagcatcacctgcaaggccagtcaggatgtgagtactgctgtagcctggtatcaacaaaaaccagggcaatctcctaaactactgatttactgggcatccacccggcacactggagtccctgatcgcttcacaggcagtggatctgggacagattatactctcaccatcagcagtgtgcaggctgaagacctggcactttattactgtcagcaacattataacactccgtacacgttcggaggggggaccaagctggaaataaaa

SEQ ID NO: 690 - DNA, 336 bp, synthetic construct
  misc_feature 1..336: note = 849.4B2 VL DNA sequence
  source 1..336: mol_type = other DNA
gatgtggggatgacccagactccactcattttgtcggttaccattggacaaccagcttccatctcttgcaagtcaagtcagagcctcttatatattaatggaaaaacctatttgaattggttattacagaggccaggccagtctccaaaacgcctaatctatctggtgtctaaattggactctggagtccctaacagattcagtggcagtggatcagggacagatttcacactgaaaatcagcagagtggaggctgaggatttgggagtttattactgcttgcagagtacacattttcctcagacgttcggtggaggcaccaagctggaaatcaaa

SEQ ID NO: 691 - DNA, 321 bp, synthetic construct
  misc_feature 1..321: note = 849.4F12 VL DNA sequence
  source 1..321: mol_type = other DNA
gacatcctgctgacccagtctccatcctccatgtctgtatctctgggagacacagtcagcatcacttgccatgcaagtcagggcattaacagtaatatagggtggttgcagcagaaaccagggaagtcatttaagggcctgatctatcatggaaccaacttggaagatggagttccatcaaggttcagtggcagtggatctggagcagattattctctcaccatcagcagcctggaatctgaagattttgcggactattactgtgtacagtatgatcagtttccgtggacgttcggtggaggcaccaagctggaaatcaaa

SEQ ID NO: 692 - DNA, 336 bp, synthetic construct
  misc_feature 1..336: note = 849.4F2 VL DNA sequence
  source 1..336: mol_type = other DNA
gatgttgggatgacccagactccactcattttgtcggttaccattggacaaccagcttccatctcttgcaagtcaagtcagagcctcttatatattaatggaaaaacctatttgaattggttattacagaggccaggccagtctccaaaacgcctaatctatctggtgtctaaattggactctggagtccctaacagattcagtggcagtggatcagggacagatttcacactgaaaatcagcagagtggaggctgaggatttgggagtttattactgcttgcagagtacacattttcctcagacgttcggtggaggcaccaagctggaaatcaaa

SEQ ID NO: 693 - DNA, 336 bp, synthetic construct
  misc_feature 1..336: note = 849.5C2 VL DNA sequence
  source 1..336: mol_type = other DNA
gatattgtgatgactcaggctgcaccctctgtacctgtcactcctggagagtcagtatccatctcctgcaggtctagtaggagtctcctgcatagtaatggctacacttacttgtattggttcctgcagaggccaggccagtctcctcggctcctgatatatcggatgtccaaccttgcctcaggagtcccagacaggttcagtggcagtgggtcaggaactgctttcacactgagaatcagtagagtggaggctgaggatgtgggtgtttattactgtatgcaacatctagaatatccgtacacgttcggaggggggaccaagctggaaataaaa

SEQ ID NO: 694 - DNA, 318 bp, synthetic construct
  misc_feature 1..318: note = 849.8D12 VL DNA sequence
  source 1..318: mol_type = other DNA
gacatccagatgacacagactacatcctccctgtctgcctctctgggagacagagtcaccatcagttgcagtgcaagtcagggcattagcaattatttaaactggtatcagcagaaaccagatggaactgttaaactcctgatctattacacatcaagtttacactcaggagtcccatcaaggttcagtggcagtgggtctgggacagattattctctcaccatcagcaacctggaacctgaagatattgccacttactattgtcagcagtatagtaagcttcctcggacgttcggtggaggcaccaagctggaaatc

SEQ ID NO: 695 - DNA, 336 bp, synthetic construct
  misc_feature 1..336: note = F847C.21H6 VL DNA sequence
  source 1..336: mol_type = other DNA
gatgttgtgatgacccagactccactcactttgtcggttaccattggacaaccagcctccatctcttgcaagtcaagtcggagcctcttagatagtgatggaaagacatatttgaattggttgttacagaggccaggccagtctccaaagcgcctaatctatctggtgtccaaactggactctggagtccctgacaggttcactggcagtggatcagggacagatttcacactgaaaatcagcagagtggaggctgaggatttgggagtttattattgctggcaaggtacacattttcctcagacgttcggtggaggcaccaagctggaaatcaat

SEQ ID NO: 696 - DNA, 321 bp, synthetic construct
  misc_feature 1..321: note = 849.5H1 VL DNA sequence
  source 1..321: mol_type = other DNA
gacatccagatgaaccagtctccatccagtctgtctgcatcccttggagacacaattaccatcacttgccatgccagtcagaacattaatgtttggttaagctggtaccagcagaaaccaggaaatattcctaaactattgatctatcaggcttccaacttacacacaggcgtcccatcaaggtttagtggccgtggatctggaacaggtttcacattaaccatcagcagcctgcagcctgaagacattgccacttactactgtcaacagggtcaaagttctccattcacgttcggctcggggacaaagttggaaataaaa

SEQ ID NO: 697 - DNA, 321 bp, synthetic construct
  misc_feature 1..321: note = 847.23F11 VL DNA sequence
  source 1..321: mol_type = other DNA
gacattttgatgacccagtctcacaaattcatgtccacatcagtaggagacagggtcagcatcacctgcaaggccagtcaggatgtgagttctgttgtagtctggtatcaacaaaaaccaggacaatctcctaaacaactaatttactgggcatccacccggcacactggagtccctgatcgcttcacaggcagtggatctgggacagattatactctcaccatcagcagtgtgcaggctgaagacctggcactttattactgtcagcaacattatagcacgccgtacacgttcggaggggggaccaagctggaaataaaa

SEQ ID NO: 698 - DNA, 327 bp, synthetic construct
  misc_feature 1..327: note = 847.16D10 VL DNA sequence
  source 1..327: mol_type = other DNA
caggctgttgtgactcaggaatctgcactcaccacatcacctggtgaaacagtcacactcacttgtcgctcaagtactggggctgttacaactagtaactatgccaactgggaccaagaaaaaccagatcatttattcactggtctaataggtggtaccaacaaccgagctccaggtgttcctgccagattctcaggctccctgattggagacaaggctgccctcaccatcacaggggcacagactgaggatgaggcaatatatttctgtgctctatggtacagcaaccatttggtgttcggtggaggaaccaaggtcactgtccta

SEQ ID NO: 699 - DNA, 333 bp, synthetic construct
  misc_feature 1..333: note = 847.13E2-mH0mL1 VL DNA sequence
  source 1..333: mol_type = other DNA
gacattgtgatgacacagtctcctgcttccttacctgtatctctggggcagagggccaccatctcatgcagggccagcaaaagtgtcactacatctgcctatagttatatacactggtaccaacagagaccaggacagccacccaaactcctcatctatcttgcatccaacctagaatctggggtccctgccaggttcagtggcagtgggtctgggacagacttcaccctcaacatccatcctgtggaggaggaggatgctgcaacctattactgtcagcacaatagggagcttcctccgacgttcggtggaggcaccaagctggaaatcaat

SEQ ID NO: 700 - DNA, 321 bp, synthetic construct
  misc_feature 1..321: note = 847.13E2-mH0mL2 VL DNA sequence
  source 1..321: mol_type = other DNA
gatattgtgctaactcagtctccagccaccctgtctgtgactccaggagatagcgtcagtttttcctgcagggccagccaaattattaacaacaacctacactggtatcaacaaaaatcacatgagtctcctaggcttctcatcaggtatacttcccagtccatctctgggatcccctccaggttcagtggcagtggatcagggacagatttcactctcagtatcaacaatgtggagactgaagattttggaatgtatttctgtcaacagactaacagctggcctctcacgttcggtgctgggaccaagctggagctgaaa

SEQ ID NO: 701 - DNA, 333 bp, synthetic construct
  misc_feature 1..333: note = 847.12C4 VL DNA sequence
  source 1..333: mol_type = other DNA
gatgttgtgatgacccagactccactcactttgtcggttaccattgaacaaacagcctccatctcttgcaagtcaagtcagagcctcttagatcgtgatggaaagacatatttgaattggttgttacagaggccaggccagtctccaaagcgcctaatctatctggtgtctaaactggactctggagtccctgacaggttcactggcagtggatcagggacagatttcacactgaaaatcagcagagtggaggctgaggatttgggagtttattattgctggcaaggtacacattttccgacgttcggtggaggcaccaagctggaaatcaaa

SEQ ID NO: 702 - DNA, 321 bp, synthetic construct
  misc_feature 1..321: note = 847.4D3 VL DNA sequence
  source 1..321: mol_type = other DNA
gatgttgtgatgacccaaactcccaaattcctgcctataacagcagaagacagggttaccattacctgcaaggccagtcagagtgtgagtaatgaagtagcttggtaccaacagaagccagggcagtctcctaaactgctgatatactatgcatccaatcgctacactggagtccctgatcgcttcactggcagtggatctggcacggatttcactttcaccatcagaagtgtgcaacttgaagacctggcagtttatttctgtcagcagcattatagctctccgtggacgttcggtggaggcaccaagctggaaatcaaa

SEQ ID NO: 703 - DNA, 1332 bp, synthetic construct
  misc_feature 1..1332: note = TB001 heavy chain DNA sequence
  source 1..1332: mol_type = other DNA
caggtgcagctggtgcagtccggctccgagctgaaaaaacccggcgcctccgtgaaagtgtcctgcaaagcctccggctacacattcacaaactacggcatgaactgggtgaggcaggcccccggccagggcctgaaatggatgggctggatcaacacaaacacaggcgagcccacatacgtggaggagttcacaggcaggttcgtgttctccctggagacatccgtgtccacagcctacctgcagatctcctccctgaaagccgaggacacagccgtgtacttctgcgccccctacgacaacttcttcgcctactggggccagggcacaacagtgacagtgtcctccgcttccaccaagggacccagcgtgttccctctggctccttgctccagatccacctccgagtctacagctgctctgggctgcctggtcaaggactactttcctgagcctgtgaccgtgtcctggaactctggcgctctgacatctggcgtgcacacctttccagctgtgctgcagtcctccggcctgtactctctgtcctctgtcgtgaccgtgccttcctctagcctgggcaccaagacctacacctgtaatgtggaccacaagccttccaacaccaaggtggacaagcgcgtggaatctaagtacggccctccttgtcctccatgtcctgctccagagtttctcggcggaccctccgtgttcctgtttcctccaaagcctaaggacaccctgatgatctctcggacccctgaagtgacctgcgtggtggtggatgtgtcccaagaggatcccgaggtgcagttcaattggtacgtggacggcgtggaagtgcacaacgccaagaccaagcctagagaggaacagttcaactccacctacagagtggtgtccgtgctgaccgtgctgcaccaggattggctgaacggcaaagagtacaagtgcaaggtgtccaacaagggcctgccttccagcatcgaaaagaccatctccaaggccaagggccagcctagggaaccccaggtttacaccctgcctccaagccaagaggaaatgaccaagaaccaggtgtccctgacctgcctcgtgaagggcttctacccttccgatatcgccgtggaatgggagagcaatggccagcctgagaacaactacaagacaacccctcctgtgctggactccgacggcagcttcttcctgtattcccgcctgaccgtggacaagtccagatggcaagagggcaacgtgttcagctgctccgtgatgcacgaggccctgcacaatcactacacccagaagtccctgtctctgtccctgggctgatga

SEQ ID NO: 704 - DNA, 1341 bp, synthetic construct
  misc_feature 1..1341: note = TB006 heavy chain DNA sequence
  source 1..1341: mol_type = other DNA
cagattcaattggttcagagcggctcagaactgaaaaagcctggagccagcgttaaagtgagctgtaaagccagtggatacacattcaccacttacgtcatgtcctgggttagacaggcccctggacaggggctggaatggatgggctggataaacactcactctggagtgcccacatacgccgacgactttacaggcaggttcgtgttttccctagatactagtgtgaatactgcatacttgcaaatctcttctctgaaagcagaggataccgccgtgtacttttgcacccgcgatgggaatgatggggatgccatggacaactggggccaggggacgactgtgacagtgtcttcagctagcaccaagggccccagcgtgtttcctctcgctccctgcagccggagcacatccgagagcaccgctgctctgggctgtctcgtgaaggactacttccctgaacccgtcaccgtcagctggaatagcggcgccctgacatccggcgtccacacattccccgctgtcctgcagagcagcggcctgtacagcctgagctccgtggtcaccgtgcctagcagcagcctgggaacaaagacctacacctgcaacgtggaccataagccctccaacaccaaggtggacaagcgggtggaatccaagtatggacccccctgtcctccttgccctgctcctgaatttctcggaggcccctccgtcttcctgtttccccccaagcccaaggacaccctgatgatctcccggacacccgaagtcacctgcgtcgtggtggatgtcagccaggaagatcccgaggtgcagttcaactggtacgtggacggagtggaggtgcataacgccaaaaccaagcccagggaagagcagttcaacagcacctatcgggtcgtgtccgtgctcaccgtcctgcatcaggattggctcaacggcaaggagtacaagtgcaaggtgtccaacaagggcctgccctcctccatcgagaagaccatctccaaggctaagggccaacctcgggagccccaagtgtataccctccctcccagccaggaggagatgaccaagaatcaagtgagcctgacctgcctcgtgaagggattttacccctccgacatcgctgtggaatgggaaagcaatggccaacctgagaacaactacaagaccacaccccccgtgctggactccgatggctccttcttcctgtacagcaggctgaccgtggacaaatcccggtggcaagagggaaacgtgttcagctgctccgtgatgcacgaggctctccacaaccactacacccagaagagcctctccctgagcctcggctagtaa

SEQ ID NO: 705 - DNA, 1350 bp, synthetic construct
  misc_feature 1..1350: note = 12G5.D7 heavy chain DNA sequence
  source 1..1350: mol_type = other DNA
caggtgcagctgaagcagtctggggctgagctggtgaggcctggggcttcagtgaagctgtcctgcaaggcttctggctacactttcactgactactatataaactgggtgaagcagaggcctggacagggacttgagtggattgcaaggatttatcctggaactggtaatactgactacaatgagaagttcaagggcagggccacactgactgcagaaaactcctccagcactgcctacatgcagctcagcagtctgacatctgaggactctgctgtctatttctgtgcaagatttgcgtattactacggtagtggagggtactttgactactggggccacggcaccactctcacagtctcctcagctagcaccaagggccccagcgtgtttcctctcgctccctgcagccggagcacatccgagagcaccgctgctctgggctgtctcgtgaaggactacttccctgaacccgtcaccgtcagctggaatagcggcgccctgacatccggcgtccacacattccccgctgtcctgcagagcagcggcctgtacagcctgagctccgtggtcaccgtgcctagcagcagcctgggaacaaagacctacacctgcaacgtggaccataagccctccaacaccaaggtggacaagcgggtggaatccaagtatggacccccctgtcctccttgccctgctcctgaatttctcggaggcccctccgtcttcctgtttccccccaagcccaaggacaccctgatgatctcccggacacccgaagtcacctgcgtcgtggtggatgtcagccaggaagatcccgaggtgcagttcaactggtacgtggacggagtggaggtgcataacgccaaaaccaagcccagggaagagcagttcaacagcacctatcgggtcgtgtccgtgctcaccgtcctgcatcaggattggctcaacggcaaggagtacaagtgcaaggtgtccaacaagggcctgccctcctccatcgagaagaccatctccaaggctaagggccaacctcgggagccccaagtgtataccctccctcccagccaggaggagatgaccaagaatcaagtgagcctgacctgcctcgtgaagggattttacccctccgacatcgctgtggaatgggaaagcaatggccaacctgagaacaactacaagaccacaccccccgtgctggactccgatggctccttcttcctgtacagcaggctgaccgtggacaaatcccggtggcaagagggaaacgtgttcagctgctccgtgatgcacgaggctctccacaaccactacacccagaagagcctctccctgagcctcggctagtaa

SEQ ID NO: 706 - DNA, 1341 bp, synthetic construct
  misc_feature 1..1341: note = 13A12.2E5 heavy chain DNA sequence
  source 1..1341: mol_type = other DNA
cagatccagttggtacagtctggacctgagctgaagaagcctggagagacagtcaagatctcctgcaagacttctgggtataaattcaaaacctatgtgatgagctgggtgaaacaggctccaggaaaggctttaaagtggatgggctggataaacacctactctggagtgccaacatatgctgatgacttcaagggacgatttgccttctctttggaaacctctgccagcactgcctatttggagatcatcaacctcaaaaatgaggacacggctacatatttctgtgcaagagatggtaactacggggatcctatggactactggggtcaaggaacctcagtcaccgtctcctcagctagcaccaagggccccagcgtgtttcctctcgctccctgcagccggagcacatccgagagcaccgctgctctgggctgtctcgtgaaggactacttccctgaacccgtcaccgtcagctggaatagcggcgccctgacatccggcgtccacacattccccgctgtcctgcagagcagcggcctgtacagcctgagctccgtggtcaccgtgcctagcagcagcctgggaacaaagacctacacctgcaacgtggaccataagccctccaacaccaaggtggacaagcgggtggaatccaagtatggacccccctgtcctccttgccctgctcctgaatttctcggaggcccctccgtcttcctgtttccccccaagcccaaggacaccctgatgatctcccggacacccgaagtcacctgcgtcgtggtggatgtcagccaggaagatcccgaggtgcagttcaactggtacgtggacggagtggaggtgcataacgccaaaaccaagcccagggaagagcagttcaacagcacctatcgggtcgtgtccgtgctcaccgtcctgcatcaggattggctcaacggcaaggagtacaagtgcaaggtgtccaacaagggcctgccctcctccatcgagaagaccatctccaaggctaagggccaacctcgggagccccaagtgtataccctccctcccagccaggaggagatgaccaagaatcaagtgagcctgacctgcctcgtgaagggattttacccctccgacatcgctgtggaatgggaaagcaatggccaacctgagaacaactacaagaccacaccccccgtgctggactccgatggctccttcttcctgtacagcaggctgaccgtggacaaatcccggtggcaagagggaaacgtgttcagctgctccgtgatgcacgaggctctccacaaccactacacccagaagagcctctccctgagcctcggctagtaa

SEQ ID NO: 707 - DNA, 1335 bp, synthetic construct
  misc_feature 1..1335: note = 14H10.2C9 heavy chain DNA sequence
  source 1..1335: mol_type = other DNA
cagatccagttggtacagtctggacctgagctgaagaagcctggagagacagtcaagatctcctgcaaggcttctgggtataccttcacaacctatggaatgggctgggtgaaacaggctccaggaaaggatttaaagtggatgggctggataaacacctactctggagtgccaacatatgctgatgacttcaagggacggtttgccttctctttggaaacctctgccagcactgcctatttgcagatcagcaacctcaaaaatgaagacacggctacatatttctgttcaaccccttatgaatacgacggggcttactggggccaggggactctggtcactgtctctgcagctagcaccaagggccccagcgtgtttcctctcgctccctgcagccggagcacatccgagagcaccgctgctctgggctgtctcgtgaaggactacttccctgaacccgtcaccgtcagctggaatagcggcgccctgacatccggcgtccacacattccccgctgtcctgcagagcagcggcctgtacagcctgagctccgtggtcaccgtgcctagcagcagcctgggaacaaagacctacacctgcaacgtggaccataagccctccaacaccaaggtggacaagcgggtggaatccaagtatggacccccctgtcctccttgccctgctcctgaatttctcggaggcccctccgtcttcctgtttccccccaagcccaaggacaccctgatgatctcccggacacccgaagtcacctgcgtcgtggtggatgtcagccaggaagatcccgaggtgcagttcaactggtacgtggacggagtggaggtgcataacgccaaaaccaagcccagggaagagcagttcaacagcacctatcgggtcgtgtccgtgctcaccgtcctgcatcaggattggctcaacggcaaggagtacaagtgcaaggtgtccaacaagggcctgccctcctccatcgagaagaccatctccaaggctaagggccaacctcgggagccccaagtgtataccctccctcccagccaggaggagatgaccaagaatcaagtgagcctgacctgcctcgtgaagggattttacccctccgacatcgctgtggaatgggaaagcaatggccaacctgagaacaactacaagaccacaccccccgtgctggactccgatggctccttcttcctgtacagcaggctgaccgtggacaaatcccggtggcaagagggaaacgtgttcagctgctccgtgatgcacgaggctctccacaaccactacacccagaagagcctctccctgagcctcggctagtaa

SEQ ID NO: 708 - DNA, 1323 bp, synthetic construct
  misc_feature 1..1323: note = 15F10.2D6 heavy chain DNA sequence
  source 1..1323: mol_type = other DNA
gaagtacagctggtggagtctgggggaggcttagtgaagcctggagggtccctgaaactctcctgtgcagcctctggattcgctttcagttcctatgccatgtcttgggttcgccagactccggaaaagaggctggagtgggtcgcaaccattagtgatggtggtgtttacacctactatacagaccatgtaaagggccgattcaccatctccagagacaatgccgaggacaacctgtacctgcaaatgagccatctgaagtctgaggacacagccatgtattattgtgtgagagatgggggctactggggccaaggcaccactctcacagtctcctcagctagcaccaagggccccagcgtgtttcctctcgctccctgcagccggagcacatccgagagcaccgctgctctgggctgtctcgtgaaggactacttccctgaacccgtcaccgtcagctggaatagcggcgccctgacatccggcgtccacacattccccgctgtcctgcagagcagcggcctgtacagcctgagctccgtggtcaccgtgcctagcagcagcctgggaacaaagacctacacctgcaacgtggaccataagccctccaacaccaaggtggacaagcgggtggaatccaagtatggacccccctgtcctccttgccctgctcctgaatttctcggaggcccctccgtcttcctgtttccccccaagcccaaggacaccctgatgatctcccggacacccgaagtcacctgcgtcgtggtggatgtcagccaggaagatcccgaggtgcagttcaactggtacgtggacggagtggaggtgcataacgccaaaaccaagcccagggaagagcagttcaacagcacctatcgggtcgtgtccgtgctcaccgtcctgcatcaggattggctcaacggcaaggagtacaagtgcaaggtgtccaacaagggcctgccctcctccatcgagaagaccatctccaaggctaagggccaacctcgggagccccaagtgtataccctccctcccagccaggaggagatgaccaagaatcaagtgagcctgacctgcctcgtgaagggattttacccctccgacatcgctgtggaatgggaaagcaatggccaacctgagaacaactacaagaccacaccccccgtgctggactccgatggctccttcttcctgtacagcaggctgaccgtggacaaatcccggtggcaagagggaaacgtgttcagctgctccgtgatgcacgaggctctccacaaccactacacccagaagagcctctccctgagcctcggctagtaa

SEQ ID NO: 709 - DNA, 1332 bp, synthetic construct
  misc_feature 1..1332: note = 19B5.2E6 heavy chain DNA sequence
  source 1..1332: mol_type = other DNA
cagatccaacttgttcagagcgggcctgaattgaagaaaccaggcgagactgtaaagatctcctgtaaggccagtggctatacattcaccacctacgcaatgagctgggtcaagcaggcacccggaaagggtctgaagtggatgggttggataaatacatactcaggcgtcccaacctacgctgatgatttgaaggggcgctttgccttttctcttgaaacctcagcatcaaccgcctacttgcagataaataacctcaaaaatgaagacaccgctacctatttctgcgcaagggggccttatgctatggactactggggccagggcacctctgtgactgtaagttctgctagcaccaagggccccagcgtgtttcctctcgctccctgcagccggagcacatccgagagcaccgctgctctgggctgtctcgtgaaggactacttccctgaacccgtcaccgtcagctggaatagcggcgccctgacatccggcgtccacacattccccgctgtcctgcagagcagcggcctgtacagcctgagctccgtggtcaccgtgcctagcagcagcctgggaacaaagacctacacctgcaacgtggaccataagccctccaacaccaaggtggacaagcgggtggaatccaagtatggacccccctgtcctccttgccctgctcctgaatttctcggaggcccctccgtcttcctgtttccccccaagcccaaggacaccctgatgatctcccggacacccgaagtcacctgcgtcgtggtggatgtcagccaggaagatcccgaggtgcagttcaactggtacgtggacggagtggaggtgcataacgccaaaaccaagcccagggaagagcagttcaacagcacctatcgggtcgtgtccgtgctcaccgtcctgcatcaggattggctcaacggcaaggagtacaagtgcaaggtgtccaacaagggcctgccctcctccatcgagaagaccatctccaaggctaagggccaacctcgggagccccaagtgtataccctccctcccagccaggaggagatgaccaagaatcaagtgagcctgacctgcctcgtgaagggattttacccctccgacatcgctgtggaatgggaaagcaatggccaacctgagaacaactacaagaccacaccccccgtgctggactccgatggctccttcttcctgtacagcaggctgaccgtggacaaatcccggtggcaagagggaaacgtgttcagctgctccgtgatgcacgaggctctccacaaccactacacccagaagagcctctccctgagcctcggctagtaa

SEQ ID NO: 710 - DNA, 1329 bp, synthetic construct
  misc_feature 1..1329: note = 20D11.2C6 heavy chain DNA sequence
  source 1..1329: mol_type = other DNA
gaggtccagctgcaacaatctggacctgaactggtgaagcctggggcttcagtgaagatatcctgtaaggcttctggatacacgttcactgacttctacataaactgggtgaagcagagccatggaaagagccttgagtggattggagatattaatcctaagaatggtggtattaactacaacccgaagttcaagatcaaggccacattgactgtagacaagtcctccagcacatcctacatggacctccgcggcctgacatctgaggactctgcagtctattactgcacctcaggctacggatttccttactggggccaagggactctggtcactgtctctgcagctagcaccaagggccccagcgtgtttcctctcgctccctgcagccggagcacatccgagagcaccgctgctctgggctgtctcgtgaaggactacttccctgaacccgtcaccgtcagctggaatagcggcgccctgacatccggcgtccacacattccccgctgtcctgcagagcagcggcctgtacagcctgagctccgtggtcaccgtgcctagcagcagcctgggaacaaagacctacacctgcaacgtggaccataagccctccaacaccaaggtggacaagcgggtggaatccaagtatggacccccctgtcctccttgccctgctcctgaatttctcggaggcccctccgtcttcctgtttccccccaagcccaaggacaccctgatgatctcccggacacccgaagtcacctgcgtcgtggtggatgtcagccaggaagatcccgaggtgcagttcaactggtacgtggacggagtggaggtgcataacgccaaaaccaagcccagggaagagcagttcaacagcacctatcgggtcgtgtccgtgctcaccgtcctgcatcaggattggctcaacggcaaggagtacaagtgcaaggtgtccaacaagggcctgccctcctccatcgagaagaccatctccaaggctaagggccaacctcgggagccccaagtgtataccctccctcccagccaggaggagatgaccaagaatcaagtgagcctgacctgcctcgtgaagggattttacccctccgacatcgctgtggaatgggaaagcaatggccaacctgagaacaactacaagaccacaccccccgtgctggactccgatggctccttcttcctgtacagcaggctgaccgtggacaaatcccggtggcaagagggaaacgtgttcagctgctccgtgatgcacgaggctctccacaaccactacacccagaagagcctctccctgagcctcggctagtaa

SEQ ID NO: 711 - DNA, 1344 bp, synthetic construct
  misc_feature 1..1344: note = 20H5.A3 heavy chain DNA sequence
  source 1..1344: mol_type = other DNA
cagatccagttggtacagtctggacctgagctgaagaagcctggagagtcagtcaagatctcctgcaaggcttctggttatgccttcacaacctatggaatgagctgggtgcaacaggctccaggaaagggtttaaagtggatgggctgggtaaacacctactctggagtgccaacatgtgctgatgacttcaagggacggtttgccttctctttggaaacctctgccagcactgcctatttgcagatcaacaacctcagaaatgaggacacggctacatatttctgtgcaagagggccctatgctatggactactggggtcaaggaacctcagtcaccgtctcctcagctaagactactcctcccagtgtctaccccctggcccccgtgtgcggcgacacaacaggctcctccgtgacactgggctgcctggtgaaaggctacttccccgagcccgtgacactgacatggaactccggctccctgtcctccggcgtgcacacattccccgccgtgctgcagtccgacctgtacacactgtcctcctccgtgacagtgacatcctccacatggccctcccagtccatcacatgcaacgtggcccaccccgcctcctccacaaaagtggacaaaaaaatcgagcccaggggccccacaatcaaaccctgccccccctgcaaatgccccgcccccaacgccgccggcggcccctccgtgttcatcttcccccccaaaatcaaagacgtgctgatgatctccctgtcccccatcgtgacatgcgtggtggtggacgtgtccgaggacgaccccgacgtgcagatctcctggttcgtgaacaacgtggaggtgcacacagcccagacacagacacacagggaggactacaactccacactgagggtggtgtccgccctgcccatccagcaccaggactggatgtccggcaaagagttcaaatgcaaagtgaacaacaaagacctgggcgcccccatcgagaggacaatctccaaacccaaaggctccgtgagggccccccaggtgtacgtgctgcccccccccgaggaggagatgacaaaaaaacaggtgacactgacatgcatggtgacagacttcatgcccgaggacatctacgtggagtggacaaacaacggcaaaacagagctgaactacaaaaacacagagcccgtgctggactccgacggctcctacttcatgtactccaaactgagggtggagaaaaaaaactgggtggagaggaactcctactcctgctccgtggtgcacgagggcctgcacaaccaccacacaacaaaatccttctccaggacacccggcaaatagtaa

SEQ ID NO: 712 - DNA, 1332 bp, synthetic construct
  misc_feature 1..1332: note = 23H9.2E4 heavy chain DNA sequence
  source 1..1332: mol_type = other DNA
cagatccagttggtacagtctggacctgagctgaagaagcctggagagacagtcaagatctcctgcaaggcttctgggtataccttcacaacctatgcaatgagctgggtgaaacaggctccaggaaagggtttaaagtggatgggctggataaacacctactctggagtgccaacatatgctgatgacctcaagggacggtttgccttctctttggaaacctctgccagcactgcctatttgcagatcaacaacctcaaaaatgaggacacggctacatatttctgtgcaagagggccctatgctatggactactggggtcaaggaacctcagtcaccgtctcctcagctagcaccaagggccccagcgtgtttcctctcgctccctgcagccggagcacatccgagagcaccgctgctctgggctgtctcgtgaaggactacttccctgaacccgtcaccgtcagctggaatagcggcgccctgacatccggcgtccacacattccccgctgtcctgcagagcagcggcctgtacagcctgagctccgtggtcaccgtgcctagcagcagcctgggaacaaagacctacacctgcaacgtggaccataagccctccaacaccaaggtggacaagcgggtggaatccaagtatggacccccctgtcctccttgccctgctcctgaatttctcggaggcccctccgtcttcctgtttccccccaagcccaaggacaccctgatgatctcccggacacccgaagtcacctgcgtcgtggtggatgtcagccaggaagatcccgaggtgcagttcaactggtacgtggacggagtggaggtgcataacgccaaaaccaagcccagggaagagcagttcaacagcacctatcgggtcgtgtccgtgctcaccgtcctgcatcaggattggctcaacggcaaggagtacaagtgcaaggtgtccaacaagggcctgccctcctccatcgagaagaccatctccaaggctaagggccaacctcgggagccccaagtgtataccctccctcccagccaggaggagatgaccaagaatcaagtgagcctgacctgcctcgtgaagggattttacccctccgacatcgctgtggaatgggaaagcaatggccaacctgagaacaactacaagaccacaccccccgtgctggactccgatggctccttcttcctgtacagcaggctgaccgtggacaaatcccggtggcaagagggaaacgtgttcagctgctccgtgatgcacgaggctctccacaaccactacacccagaagagcctctccctgagcctcggctagtaa

SEQ ID NO: 713 - DNA, 1344 bp, synthetic construct
  misc_feature 1..1344: note = 2D10-VH0-VL0 heavy chain DNA sequence
  source 1..1344: mol_type = other DNA
cagtttcagcttcaacagtctggtcctgaactcgtaaagcctggggccagtgtaaaaatatcctgtaaggcatcaggatacactttcaccgattactacatcaactgggtaaagcagcgacctggtcagggactggagtggattggctggatctaccccggatcaaatgacaccaaatacaatgagaagttcaagggcaaagctacccttacagtcgatacctcctcctccaccgcatatatgcaacttgggtcactgacttcagaggattctgcagtctatttttgcgctaattactttggatgcagcggctggtttttcgacgtgtggggaaccggaaccacagtgacagtatcctctgctagcaccaagggccccagcgtgtttcctctcgctccctgcagccggagcacatccgagagcaccgctgctctgggctgtctcgtgaaggactacttccctgaacccgtcaccgtcagctggaatagcggcgccctgacatccggcgtccacacattccccgctgtcctgcagagcagcggcctgtacagcctgagctccgtggtcaccgtgcctagcagcagcctgggaacaaagacctacacctgcaacgtggaccataagccctccaacaccaaggtggacaagcgggtggaatccaagtatggacccccctgtcctccttgccctgctcctgaatttctcggaggcccctccgtcttcctgtttccccccaagcccaaggacaccctgatgatctcccggacacccgaagtcacctgcgtcgtggtggatgtcagccaggaagatcccgaggtgcagttcaactggtacgtggacggagtggaggtgcataacgccaaaaccaagcccagggaagagcagttcaacagcacctatcgggtcgtgtccgtgctcaccgtcctgcatcaggattggctcaacggcaaggagtacaagtgcaaggtgtccaacaagggcctgccctcctccatcgagaagaccatctccaaggctaagggccaacctcgggagccccaagtgtataccctccctcccagccaggaggagatgaccaagaatcaagtgagcctgacctgcctcgtgaagggattttacccctccgacatcgctgtggaatgggaaagcaatggccaacctgagaacaactacaagaccacaccccccgtgctggactccgatggctccttcttcctgtacagcaggctgaccgtggacaaatcccggtggcaagagggaaacgtgttcagctgctccgtgatgcacgaggctctccacaaccactacacccagaagagcctctccctgagcctcggctagtaa

SEQ ID NO: 714 - DNA, 1341 bp, synthetic construct
  misc_feature 1..1341: note = 3B11.2G2 heavy chain DNA sequence
  source 1..1341: mol_type = other DNA
cagatccagttggtacagtctggacctgagctgaagaagcctggagagacagtcaagatctcctgcaagacttctgggtataaattcaaaacctatgtaatgagctgggtgaaacaggctccaggaaaggctttaaagtggatgggctggataaacacctactctggagtgccaacatatgctgatgacttcaagggacggtttgccttctctttggaaacctctgccagcactgcctatttggagatcatcaacctcaaaaatgaggacacggctacatatttctgtgcaagagatggtaattacggggatcctatggactactggggtcaaggaacctcagtcaccgtctcctcagctagcaccaagggccccagcgtgtttcctctcgctccctgcagccggagcacatccgagagcaccgctgctctgggctgtctcgtgaaggactacttccctgaacccgtcaccgtcagctggaatagcggcgccctgacatccggcgtccacacattccccgctgtcctgcagagcagcggcctgtacagcctgagctccgtggtcaccgtgcctagcagcagcctgggaacaaagacctacacctgcaacgtggaccataagccctccaacaccaaggtggacaagcgggtggaatccaagtatggacccccctgtcctccttgccctgctcctgaatttctcggaggcccctccgtcttcctgtttccccccaagcccaaggacaccctgatgatctcccggacacccgaagtcacctgcgtcgtggtggatgtcagccaggaagatcccgaggtgcagttcaactggtacgtggacggagtggaggtgcataacgccaaaaccaagcccagggaagagcagttcaacagcacctatcgggtcgtgtccgtgctcaccgtcctgcatcaggattggctcaacggcaaggagtacaagtgcaaggtgtccaacaagggcctgccctcctccatcgagaagaccatctccaaggctaagggccaacctcgggagccccaagtgtataccctccctcccagccaggaggagatgaccaagaatcaagtgagcctgacctgcctcgtgaagggattttacccctccgacatcgctgtggaatgggaaagcaatggccaacctgagaacaactacaagaccacaccccccgtgctggactccgatggctccttcttcctgtacagcaggctgaccgtggacaaatcccggtggcaagagggaaacgtgttcagctgctccgtgatgcacgaggctctccacaaccactacacccagaagagcctctccctgagcctcggctagtaa

SEQ ID NO: 715 - DNA, 1323 bp, synthetic construct
  misc_feature 1..1323: note = 7D8.2D8 heavy chain DNA sequence
  source 1..1323: mol_type = other DNA
gaagtgcagctggtggagtctgggggaggcttagtgaagcctggagggtccctgaaactctcctgtgcagcctctggattcactttcagtagctatgccatgtcttgggttcgccagactccggaaaagaggctggagtgggtcgcaaccatcagtgatggtggtatttacacctactatccagacaatgtaaagggccgattcaccatttccagagacaatgccaagaacaacctgttcctgcaaatgagccatctgaagtctgaggatacagccatgtattactgtgtaagagatgggggctactggggccaaggcaccactctcacagtctcctcagctagcaccaagggccccagcgtgtttcctctcgctccctgcagccggagcacatccgagagcaccgctgctctgggctgtctcgtgaaggactacttccctgaacccgtcaccgtcagctggaatagcggcgccctgacatccggcgtccacacattccccgctgtcctgcagagcagcggcctgtacagcctgagctccgtggtcaccgtgcctagcagcagcctgggaacaaagacctacacctgcaacgtggaccataagccctccaacaccaaggtggacaagcgggtggaatccaagtatggacccccctgtcctccttgccctgctcctgaatttctcggaggcccctccgtcttcctgtttccccccaagcccaaggacaccctgatgatctcccggacacccgaagtcacctgcgtcgtggtggatgtcagccaggaagatcccgaggtgcagttcaactggtacgtggacggagtggaggtgcataacgccaaaaccaagcccagggaagagcagttcaacagcacctatcgggtcgtgtccgtgctcaccgtcctgcatcaggattggctcaacggcaaggagtacaagtgcaaggtgtccaacaagggcctgccctcctccatcgagaagaccatctccaaggctaagggccaacctcgggagccccaagtgtataccctccctcccagccaggaggagatgaccaagaatcaagtgagcctgacctgcctcgtgaagggattttacccctccgacatcgctgtggaatgggaaagcaatggccaacctgagaacaactacaagaccacaccccccgtgctggactccgatggctccttcttcctgtacagcaggctgaccgtggacaaatcccggtggcaagagggaaacgtgttcagctgctccgtgatgcacgaggctctccacaaccactacacccagaagagcctctccctgagcctcggctagtaa

SEQ ID NO: 716 - DNA, 1344 bp, synthetic construct
  misc_feature 1..1344: note = mIMT001 heavy chain DNA sequence
  source 1..1344: mol_type = other DNA
cagatccaacttgtgcagtcaggtccagaattgaagaagcctggtgagaccgtcaagatttcctgtaaggcctctggttatacttttaccaactatggcatgaattgggtcaagcaggcacctgggaagggtttgaaatggatggggtggataaataccaacacaggggaaccaacttacgttgaagagtttaagggtcgttttgcattcagtcttgagacttctgcaagcacagcttacctccaaattaacaatctcaaaaatgaagatactgctacatatttctgtgctccttatgataattttttcgcctactggggacagggaactctggtcaccgtctcagcagctaagactactcctcccagtgtctaccccctggcccccgtgtgcggcgacacaacaggctcctccgtgacactgggctgcctggtgaaaggctacttccccgagcccgtgacactgacatggaactccggctccctgtcctccggcgtgcacacattccccgccgtgctgcagtccgacctgtacacactgtcctcctccgtgacagtgacatcctccacatggccctcccagtccatcacatgcaacgtggcccaccccgcctcctccacaaaagtggacaaaaaaatcgagcccaggggccccacaatcaaaccctgccccccctgcaaatgccccgcccccaacgccgccggcggcccctccgtgttcatcttcccccccaaaatcaaagacgtgctgatgatctccctgtcccccatcgtgacatgcgtggtggtggacgtgtccgaggacgaccccgacgtgcagatctcctggttcgtgaacaacgtggaggtgcacacagcccagacacagacacacagggaggactacaactccacactgagggtggtgtccgccctgcccatccagcaccaggactggatgtccggcaaagagttcaaatgcaaagtgaacaacaaagacctgggcgcccccatcgagaggacaatctccaaacccaaaggctccgtgagggccccccaggtgtacgtgctgcccccccccgaggaggagatgacaaaaaaacaggtgacactgacatgcatggtgacagacttcatgcccgaggacatctacgtggagtggacaaacaacggcaaaacagagctgaactacaaaaacacagagcccgtgctggactccgacggctcctacttcatgtactccaaactgagggtggagaaaaaaaactgggtggagaggaactcctactcctgctccgtggtgcacgagggcctgcacaaccaccacacaacaaaatccttctccaggacacccggcaaatagtaa

SEQ ID NO: 717 - DNA, 1332 bp, synthetic construct
  misc_feature 1..1332: note = 4A11.2B5 heavy chain DNA sequence
  source 1..1332: mol_type = other DNA
caggtacaacttcagcagagcggtccagaacttgtgaagcccggtgctagtgtcaaaatatcttgcaaagcaagtggttattccttcaccaactattacatacactgggtaaaacaacgtccagggcaaggactcgaatggattggttggatctaccccggcagcggcaacactaactacaacgagaagtttaaaggcaaagctactctcacagcagacacttctagcagtacaacaaatatgcagttgtcctctctgacttccgaagacagcgccgtctattactgttctactgcacccggaggttttgacgtctggggttccggcaccacagttaccgttagttccgctagcaccaagggccccagcgtgtttcctctcgctccctgcagccggagcacatccgagagcaccgctgctctgggctgtctcgtgaaggactacttccctgaacccgtcaccgtcagctggaatagcggcgccctgacatccggcgtccacacattccccgctgtcctgcagagcagcggcctgtacagcctgagctccgtggtcaccgtgcctagcagcagcctgggaacaaagacctacacctgcaacgtggaccataagccctccaacaccaaggtggacaagcgggtggaatccaagtatggacccccctgtcctccttgccctgctcctgaatttctcggaggcccctccgtcttcctgtttccccccaagcccaaggacaccctgatgatctcccggacacccgaagtcacctgcgtcgtggtggatgtcagccaggaagatcccgaggtgcagttcaactggtacgtggacggagtggaggtgcataacgccaaaaccaagcccagggaagagcagttcaacagcacctatcgggtcgtgtccgtgctcaccgtcctgcatcaggattggctcaacggcaaggagtacaagtgcaaggtgtccaacaagggcctgccctcctccatcgagaagaccatctccaaggctaagggccaacctcgggagccccaagtgtataccctccctcccagccaggaggagatgaccaagaatcaagtgagcctgacctgcctcgtgaagggattttacccctccgacatcgctgtggaatgggaaagcaatggccaacctgagaacaactacaagaccacaccccccgtgctggactccgatggctccttcttcctgtacagcaggctgaccgtggacaaatcccggtggcaagagggaaacgtgttcagctgctccgtgatgcacgaggctctccacaaccactacacccagaagagcctctccctgagcctcggctagtaa

SEQ ID NO: 718 - DNA, 1332 bp, synthetic construct
  misc_feature 1..1332: note = 4A11.H1L1 heavy chain DNA sequence
  source 1..1332: mol_type = other DNA
caggtgcagctggtgcaatcaggagccgaagttaagaagcctggcgccagcgtcaaggtctcatgtaaagcctccggttacagtttcaccaactactatatgcactgggttaggcaagcaccaggccaggggcttgagtggatgggatggatctatccagggagcggtaacaccaattacaatgagaagtttcaagggcgcgtaaccatgacagcagataccagtataagcaccgcctatatggaactctctcggttgagatccgatgataccgctgtttattactgctctaccgcacctggtggtttcgacgtttggggccaaggtactacagtgaccgtatcatcagctagcaccaagggccccagcgtgtttcctctcgctccctgcagccggagcacatccgagagcaccgctgctctgggctgtctcgtgaaggactacttccctgaacccgtcaccgtcagctggaatagcggcgccctgacatccggcgtccacacattccccgctgtcctgcagagcagcggcctgtacagcctgagctccgtggtcaccgtgcctagcagcagcctgggaacaaagacctacacctgcaacgtggaccataagccctccaacaccaaggtggacaagcgggtggaatccaagtatggacccccctgtcctccttgccctgctcctgaatttctcggaggcccctccgtcttcctgtttccccccaagcccaaggacaccctgatgatctcccggacacccgaagtcacctgcgtcgtggtggatgtcagccaggaagatcccgaggtgcagttcaactggtacgtggacggagtggaggtgcataacgccaaaaccaagcccagggaagagcagttcaacagcacctatcgggtcgtgtccgtgctcaccgtcctgcatcaggattggctcaacggcaaggagtacaagtgcaaggtgtccaacaagggcctgccctcctccatcgagaagaccatctccaaggctaagggccaacctcgggagccccaagtgtataccctccctcccagccaggaggagatgaccaagaatcaagtgagcctgacctgcctcgtgaagggattttacccctccgacatcgctgtggaatgggaaagcaatggccaacctgagaacaactacaagaccacaccccccgtgctggactccgatggctccttcttcctgtacagcaggctgaccgtggacaaatcccggtggcaagagggaaacgtgttcagctgctccgtgatgcacgaggctctccacaaccactacacccagaagagcctctccctgagcctcggctagtaa

SEQ ID NO: 719 - DNA, 1332 bp, synthetic construct
  misc_feature 1..1332: note = 4A11.H4L2 heavy chain DNA sequence
  source 1..1332: mol_type = other DNA
caggtgcaactggtccagtctggggccgaggtcaaaaagcctggagcctccgtcaaagtgtcatgtaaagcctcagggtatagtttcaccaactactatatacattgggtcagacaagccccaggccagcgtcttgagtggatgggatggatttatcccggatcagggaatacaaactataacgagaaatttcaaggcagagttactctcactgccgatacctctgcaagtactacctatatggagctctccagtctcagaagcgaagacacagcagtatattactgtagcaccgccccaggcgggtttgacgtgtggggccaaggcactactgtaaccgttagctcagctagcaccaagggccccagcgtgtttcctctcgctccctgcagccggagcacatccgagagcaccgctgctctgggctgtctcgtgaaggactacttccctgaacccgtcaccgtcagctggaatagcggcgccctgacatccggcgtccacacattccccgctgtcctgcagagcagcggcctgtacagcctgagctccgtggtcaccgtgcctagcagcagcctgggaacaaagacctacacctgcaacgtggaccataagccctccaacaccaaggtggacaagcgggtggaatccaagtatggacccccctgtcctccttgccctgctcctgaatttctcggaggcccctccgtcttcctgtttccccccaagcccaaggacaccctgatgatctcccggacacccgaagtcacctgcgtcgtggtggatgtcagccaggaagatcccgaggtgcagttcaactggtacgtggacggagtggaggtgcataacgccaaaaccaagcccagggaagagcagttcaacagcacctatcgggtcgtgtccgtgctcaccgtcctgcatcaggattggctcaacggcaaggagtacaagtgcaaggtgtccaacaagggcctgccctcctccatcgagaagaccatctccaaggctaagggccaacctcgggagccccaagtgtataccctccctcccagccaggaggagatgaccaagaatcaagtgagcctgacctgcctcgtgaagggattttacccctccgacatcgctgtggaatgggaaagcaatggccaacctgagaacaactacaagaccacaccccccgtgctggactccgatggctccttcttcctgtacagcaggctgaccgtggacaaatcccggtggcaagagggaaacgtgttcagctgctccgtgatgcacgaggctctccacaaccactacacccagaagagcctctccctgagcctcggctagtaa

SEQ ID NO: 720 - DNA, 1341 bp, synthetic construct
  misc_feature 1..1341: note = 4G2.2G6 heavy chain DNA sequence
  source 1..1341: mol_type = other DNA
caaatacagctcgtgcagtctggtcccgatttgaagaagcctggagaaaccgtaaagataagctgtaaggctagtggttacactttcacaacatacgttatgtcatgggttaaacaggctcctggaaaagaccttaaatggatgggatggattaacacccatagcggtgtcccaacttacgctgacgattttaagggacgatttgacttttctctcgaaacttctgccaacacagcttttttgcagatcaacaatctcaagaatgaagacaccgcaacctatttctgcactcgagatgggaacgacggggatgcaatggataactggggacaaggcacatcagttaccgtgagctctgctagcaccaagggccccagcgtgtttcctctcgctccctgcagccggagcacatccgagagcaccgctgctctgggctgtctcgtgaaggactacttccctgaacccgtcaccgtcagctggaatagcggcgccctgacatccggcgtccacacattccccgctgtcctgcagagcagcggcctgtacagcctgagctccgtggtcaccgtgcctagcagcagcctgggaacaaagacctacacctgcaacgtggaccataagccctccaacaccaaggtggacaagcgggtggaatccaagtatggacccccctgtcctccttgccctgctcctgaatttctcggaggcccctccgtcttcctgtttccccccaagcccaaggacaccctgatgatctcccggacacccgaagtcacctgcgtcgtggtggatgtcagccaggaagatcccgaggtgcagttcaactggtacgtggacggagtggaggtgcataacgccaaaaccaagcccagggaagagcagttcaacagcacctatcgggtcgtgtccgtgctcaccgtcctgcatcaggattggctcaacggcaaggagtacaagtgcaaggtgtccaacaagggcctgccctcctccatcgagaagaccatctccaaggctaagggccaacctcgggagccccaagtgtataccctccctcccagccaggaggagatgaccaagaatcaagtgagcctgacctgcctcgtgaagggattttacccctccgacatcgctgtggaatgggaaagcaatggccaacctgagaacaactacaagaccacaccccccgtgctggactccgatggctccttcttcctgtacagcaggctgaccgtggacaaatcccggtggcaagagggaaacgtgttcagctgctccgtgatgcacgaggctctccacaaccactacacccagaagagcctctccctgagcctcggctagtaa

SEQ ID NO: 721 - DNA, 1344 bp, synthetic construct
  misc_feature 1..1344: note = 6B3.2D3 heavy chain DNA sequence
  source 1..1344: mol_type = other DNA
caggtgcagctgaagcagtcaggacctggcctagtgcagccctcacagagcctgtccatcacctgcacagtctctggtttctcattaactagttatggtgtacactgggttcgccagcctccaggaaagggtctggagtggctgggagtgatatggagtggtggaagcacagactataatgctgctttcatatccagactgagcatcagtaaggacaactccaagagccaagttttctttaaaatgaacagtctgcaagctgatgacactgccatatactactgtgccaaagggccttatgattacgacttaggctggtttgcttactggggccaagggactctggtcactgtctctgcagctagcaccaagggccccagcgtgtttcctctcgctccctgcagccggagcacatccgagagcaccgctgctctgggctgtctcgtgaaggactacttccctgaacccgtcaccgtcagctggaatagcggcgccctgacatccggcgtccacacattccccgctgtcctgcagagcagcggcctgtacagcctgagctccgtggtcaccgtgcctagcagcagcctgggaacaaagacctacacctgcaacgtggaccataagccctccaacaccaaggtggacaagcgggtggaatccaagtatggacccccctgtcctccttgccctgctcctgaatttctcggaggcccctccgtcttcctgtttccccccaagcccaaggacaccctgatgatctcccggacacccgaagtcacctgcgtcgtggtggatgtcagccaggaagatcccgaggtgcagttcaactggtacgtggacggagtggaggtgcataacgccaaaaccaagcccagggaagagcagttcaacagcacctatcgggtcgtgtccgtgctcaccgtcctgcatcaggattggctcaacggcaaggagtacaagtgcaaggtgtccaacaagggcctgccctcctccatcgagaagaccatctccaaggctaagggccaacctcgggagccccaagtgtataccctccctcccagccaggaggagatgaccaagaatcaagtgagcctgacctgcctcgtgaagggattttacccctccgacatcgctgtggaatgggaaagcaatggccaacctgagaacaactacaagaccacaccccccgtgctggactccgatggctccttcttcctgtacagcaggctgaccgtggacaaatcccggtggcaagagggaaacgtgttcagctgctccgtgatgcacgaggctctccacaaccactacacccagaagagcctctccctgagcctcggctagtaa

SEQ ID NO: 722 - DNA, 1332 bp, synthetic construct
  misc_feature 1..1332: note = 6H6.2D6 heavy chain DNA sequence
  source 1..1332: mol_type = other DNA
cagatccagctggtgcagtccggccccgagctgaagaagcccggcgagactgtgaagatctcctgcaaggcctccggctacaccttcaccacctacggcatgtcctgggtgaagcaggcccccggcaagggcctgaagtggatggcctggatcaacacctactccggcgtgcccacctacgccgacgacttcaagggcaggttcgccttctccctggagacttccgcctccaccgcctacctgcagatcaacaacctgaccaacgaggacaccgccacctacttctgcgccaggggcccctacgccatggactactggggccagggcacctccgtgaccgtgtcctccgctagcaccaagggccccagcgtgtttcctctcgctccctgcagccggagcacatccgagagcaccgctgctctgggctgtctcgtgaaggactacttccctgaacccgtcaccgtcagctggaatagcggcgccctgacatccggcgtccacacattccccgctgtcctgcagagcagcggcctgtacagcctgagctccgtggtcaccgtgcctagcagcagcctgggaacaaagacctacacctgcaacgtggaccataagccctccaacaccaaggtggacaagcgggtggaatccaagtatggacccccctgtcctccttgccctgctcctgaatttctcggaggcccctccgtcttcctgtttccccccaagcccaaggacaccctgatgatctcccggacacccgaagtcacctgcgtcgtggtggatgtcagccaggaagatcccgaggtgcagttcaactggtacgtggacggagtggaggtgcataacgccaaaaccaagcccagggaagagcagttcaacagcacctatcgggtcgtgtccgtgctcaccgtcctgcatcaggattggctcaacggcaaggagtacaagtgcaaggtgtccaacaagggcctgccctcctccatcgagaagaccatctccaaggctaagggccaacctcgggagccccaagtgtataccctccctcccagccaggaggagatgaccaagaatcaagtgagcctgacctgcctcgtgaagggattttacccctccgacatcgctgtggaatgggaaagcaatggccaacctgagaacaactacaagaccacaccccccgtgctggactccgatggctccttcttcctgtacagcaggctgaccgtggacaaatcccggtggcaagagggaaacgtgttcagctgctccgtgatgcacgaggctctccacaaccactacacccagaagagcctctccctgagcctcggctagtaa

SEQ ID NO: 723 - DNA, 1329 bp, synthetic construct
  misc_feature 1..1329: note = 9H2.2H10 heavy chain DNA sequence
  source 1..1329: mol_type = other DNA
caggtccagctgcagcagcctggggctgaactggtggggcctgggtcttcagtgaagctgtcctgcaaggcttctggctacaccttcaccaactactggatacattgggtgaagcagaggcctctacaaggccttgaatggattggtaacattgacccttctgatagtgaaactcactacaatcaaaagttcaaggacaaggccacattgactgtagacaaatcctccagcacagcctacatgcaactcagcagcctgacatctgaggactctgcggtctattactgtgcaagacatggttactacgactactggggccaaggcaccactctcacagtctcctcagctagcaccaagggccccagcgtgtttcctctcgctccctgcagccggagcacatccgagagcaccgctgctctgggctgtctcgtgaaggactacttccctgaacccgtcaccgtcagctggaatagcggcgccctgacatccggcgtccacacattccccgctgtcctgcagagcagcggcctgtacagcctgagctccgtggtcaccgtgcctagcagcagcctgggaacaaagacctacacctgcaacgtggaccataagccctccaacaccaaggtggacaagcgggtggaatccaagtatggacccccctgtcctccttgccctgctcctgaatttctcggaggcccctccgtcttcctgtttccccccaagcccaaggacaccctgatgatctcccggacacccgaagtcacctgcgtcgtggtggatgtcagccaggaagatcccgaggtgcagttcaactggtacgtggacggagtggaggtgcataacgccaaaaccaagcccagggaagagcagttcaacagcacctatcgggtcgtgtccgtgctcaccgtcctgcatcaggattggctcaacggcaaggagtacaagtgcaaggtgtccaacaagggcctgccctcctccatcgagaagaccatctccaaggctaagggccaacctcgggagccccaagtgtataccctccctcccagccaggaggagatgaccaagaatcaagtgagcctgacctgcctcgtgaagggattttacccctccgacatcgctgtggaatgggaaagcaatggccaacctgagaacaactacaagaccacaccccccgtgctggactccgatggctccttcttcctgtacagcaggctgaccgtggacaaatcccggtggcaagagggaaacgtgttcagctgctccgtgatgcacgaggctctccacaaccactacacccagaagagcctctccctgagcctcggctagtaa

SEQ ID NO: 724 - DNA, 1341 bp, synthetic construct
  misc_feature 1..1341: note = 13G4.2F8 heavy chain DNA sequence
  source 1..1341: mol_type = other DNA
caggtccagctgcagcagcctggggctgagctggtaaagcctggggcttcagtgaagttgtcctgcaaggcttctggctacactttcaccagctactggatgcactgggtgaagcagaggcctggacaaggccttgagtggattggaatgattcatcctaacagtggtagtactgactacaatgagaagttcaagaacaaggccacactgaatgtagacaaatcctccagtacagcctacatacaactcagcagcctgacatctgaggactctgcggtctattactgtacaagatgggggatttattactacgcgagggactactggggccaaggcaccactctcacagtctcctcagctagcaccaagggccccagcgtgtttcctctcgctccctgcagccggagcacatccgagagcaccgctgctctgggctgtctcgtgaaggactacttccctgaacccgtcaccgtcagctggaatagcggcgccctgacatccggcgtccacacattccccgctgtcctgcagagcagcggcctgtacagcctgagctccgtggtcaccgtgcctagcagcagcctgggaacaaagacctacacctgcaacgtggaccataagccctccaacaccaaggtggacaagcgggtggaatccaagtatggacccccctgtcctccttgccctgctcctgaatttctcggaggcccctccgtcttcctgtttccccccaagcccaaggacaccctgatgatctcccggacacccgaagtcacctgcgtcgtggtggatgtcagccaggaagatcccgaggtgcagttcaactggtacgtggacggagtggaggtgcataacgccaaaaccaagcccagggaagagcagttcaacagcacctatcgggtcgtgtccgtgctcaccgtcctgcatcaggattggctcaacggcaaggagtacaagtgcaaggtgtccaacaagggcctgccctcctccatcgagaagaccatctccaaggctaagggccaacctcgggagccccaagtgtataccctccctcccagccaggaggagatgaccaagaatcaagtgagcctgacctgcctcgtgaagggattttacccctccgacatcgctgtggaatgggaaagcaatggccaacctgagaacaactacaagaccacaccccccgtgctggactccgatggctccttcttcctgtacagcaggctgaccgtggacaaatcccggtggcaagagggaaacgtgttcagctgctccgtgatgcacgaggctctccacaaccactacacccagaagagcctctccctgagcctcggctagtaa

SEQ ID NO: 725 - DNA, 1335 bp, synthetic construct
  misc_feature 1..1335: note = 13H12.2F8 heavy chain DNA sequence
  source 1..1335: mol_type = other DNA
cagatccagctggtccaatcaggacccgaactgaaaaaaccaggcgagacagtcaaaatcagctgtaaggcctcaggctacactttcacaacctacgggatgtcatgggtaaagcaagctcctggcaaggggctgaaatggatgggttggatcaacacatactctggagtgcccacctacgctgacgactttaagggtagattcgcatttagcctggaaacaagtgccagtacagcctacctccagataaacaacttgaaaaacgaggataccgcaacctatttttgcgccgtcccctacgagtacgacggtgcctattggggtcagggtacactcgtaacagtttccgccgctagcaccaagggccccagcgtgtttcctctcgctccctgcagccggagcacatccgagagcaccgctgctctgggctgtctcgtgaaggactacttccctgaacccgtcaccgtcagctggaatagcggcgccctgacatccggcgtccacacattccccgctgtcctgcagagcagcggcctgtacagcctgagctccgtggtcaccgtgcctagcagcagcctgggaacaaagacctacacctgcaacgtggaccataagccctccaacaccaaggtggacaagcgggtggaatccaagtatggacccccctgtcctccttgccctgctcctgaatttctcggaggcccctccgtcttcctgtttccccccaagcccaaggacaccctgatgatctcccggacacccgaagtcacctgcgtcgtggtggatgtcagccaggaagatcccgaggtgcagttcaactggtacgtggacggagtggaggtgcataacgccaaaaccaagcccagggaagagcagttcaacagcacctatcgggtcgtgtccgtgctcaccgtcctgcatcaggattggctcaacggcaaggagtacaagtgcaaggtgtccaacaagggcctgccctcctccatcgagaagaccatctccaaggctaagggccaacctcgggagccccaagtgtataccctccctcccagccaggaggagatgaccaagaatcaagtgagcctgacctgcctcgtgaagggattttacccctccgacatcgctgtggaatgggaaagcaatggccaacctgagaacaactacaagaccacaccccccgtgctggactccgatggctccttcttcctgtacagcaggctgaccgtggacaaatcccggtggcaagagggaaacgtgttcagctgctccgtgatgcacgaggctctccacaaccactacacccagaagagcctctccctgagcctcggctagtaa

SEQ ID NO: 726 - DNA, 1329 bp, synthetic construct
  misc_feature 1..1329: note = 15G7.2A7 heavy chain DNA sequence
  source 1..1329: mol_type = other DNA
gaggtccagctgcaacaatctggacctgagctggtgaagcctggggcttcagtgaagatatcctgtaaggcttctggatacacgttcactgactactacatgaactgggtgaagcagagccatggaaagagccttgagtggattggagatattaatcctaacaatggtggtactaactacaaccagaagttcaagggcaaggccacattgactgtagacaagtcctccagcacagcctacatggagctccgcagcctgacatctgaggactctgcagtctattactgcacctcaggctacgggtttccttactggggccaggggactctggtcactgtctctgcagctagcaccaagggccccagcgtgtttcctctcgctccctgcagccggagcacatccgagagcaccgctgctctgggctgtctcgtgaaggactacttccctgaacccgtcaccgtcagctggaatagcggcgccctgacatccggcgtccacacattccccgctgtcctgcagagcagcggcctgtacagcctgagctccgtggtcaccgtgcctagcagcagcctgggaacaaagacctacacctgcaacgtggaccataagccctccaacaccaaggtggacaagcgggtggaatccaagtatggacccccctgtcctccttgccctgctcctgaatttctcggaggcccctccgtcttcctgtttccccccaagcccaaggacaccctgatgatctcccggacacccgaagtcacctgcgtcgtggtggatgtcagccaggaagatcccgaggtgcagttcaactggtacgtggacggagtggaggtgcataacgccaaaaccaagcccagggaagagcagttcaacagcacctatcgggtcgtgtccgtgctcaccgtcctgcatcaggattggctcaacggcaaggagtacaagtgcaaggtgtccaacaagggcctgccctcctccatcgagaagaccatctccaaggctaagggccaacctcgggagccccaagtgtataccctccctcccagccaggaggagatgaccaagaatcaagtgagcctgacctgcctcgtgaagggattttacccctccgacatcgctgtggaatgggaaagcaatggccaacctgagaacaactacaagaccacaccccccgtgctggactccgatggctccttcttcctgtacagcaggctgaccgtggacaaatcccggtggcaagagggaaacgtgttcagctgctccgtgatgcacgaggctctccacaaccactacacccagaagagcctctccctgagcctcggctagtaa

SEQ ID NO: 727 - DNA, 1335 bp, synthetic construct
  misc_feature 1..1335: note = 19D9.2E5 heavy chain DNA sequence
  source 1..1335: mol_type = other DNA
cagatccagttggtacagtctggacctgagctgaagaagcctggagagacagtcaagatctcctgcaaggcttctggatataccttcacaacctatggaatgggctgggtgaaacaggctccaggaaagggtttgaagtggatgggctggataaacacctactctggcgtgccaacatatgctgatgacttcaagggacggtttgccttctctttggaaacctctaccagcactgcctatttgcagatcaacaacctcaaaaatgaggacatggctacatatttctgtgcaaccccttatgaatacgacggggcttactggggccaagggactctggtcactgtctctgcagctagcaccaagggccccagcgtgtttcctctcgctccctgcagccggagcacatccgagagcaccgctgctctgggctgtctcgtgaaggactacttccctgaacccgtcaccgtcagctggaatagcggcgccctgacatccggcgtccacacattccccgctgtcctgcagagcagcggcctgtacagcctgagctccgtggtcaccgtgcctagcagcagcctgggaacaaagacctacacctgcaacgtggaccataagccctccaacaccaaggtggacaagcgggtggaatccaagtatggacccccctgtcctccttgccctgctcctgaatttctcggaggcccctccgtcttcctgtttccccccaagcccaaggacaccctgatgatctcccggacacccgaagtcacctgcgtcgtggtggatgtcagccaggaagatcccgaggtgcagttcaactggtacgtggacggagtggaggtgcataacgccaaaaccaagcccagggaagagcagttcaacagcacctatcgggtcgtgtccgtgctcaccgtcctgcatcaggattggctcaacggcaaggagtacaagtgcaaggtgtccaacaagggcctgccctcctccatcgagaagaccatctccaaggctaagggccaacctcgggagccccaagtgtataccctccctcccagccaggaggagatgaccaagaatcaagtgagcctgacctgcctcgtgaagggattttacccctccgacatcgctgtggaatgggaaagcaatggccaacctgagaacaactacaagaccacaccccccgtgctggactccgatggctccttcttcctgtacagcaggctgaccgtggacaaatcccggtggcaagagggaaacgtgttcagctgctccgtgatgcacgaggctctccacaaccactacacccagaagagcctctccctgagcctcggctagtaa

SEQ ID NO: 728 - DNA, 1320 bp, synthetic construct
  misc_feature 1..1320: note = 23B10.2B12 heavy chain DNA sequence
  source 1..1320: mol_type = other DNA
caggtccagctgcagcagtctggacctgaactggtgaagcctggggattctgtgaagatatcctgcaaggctgctggctacaccttcagtgactattatataaactgggtgaagcagaggcctggacagggacttgagtggattggatggatttatcctgtaagcgttaatactaagtacaatgagaagttcaagggcaaggccacattgactgtagacacatcctccagcacagcctacatgcagctcagcagcctgacctctgaggactctggggtctatttctgtgcctaccttgattattggggccaagggactctggtcactgtctctgcagctagcaccaagggccccagcgtgtttcctctcgctccctgcagccggagcacatccgagagcaccgctgctctgggctgtctcgtgaaggactacttccctgaacccgtcaccgtcagctggaatagcggcgccctgacatccggcgtccacacattccccgctgtcctgcagagcagcggcctgtacagcctgagctccgtggtcaccgtgcctagcagcagcctgggaacaaagacctacacctgcaacgtggaccataagccctccaacaccaaggtggacaagcgggtggaatccaagtatggacccccctgtcctccttgccctgctcctgaatttctcggaggcccctccgtcttcctgtttccccccaagcccaaggacaccctgatgatctcccggacacccgaagtcacctgcgtcgtggtggatgtcagccaggaagatcccgaggtgcagttcaactggtacgtggacggagtggaggtgcataacgccaaaaccaagcccagggaagagcagttcaacagcacctatcgggtcgtgtccgtgctcaccgtcctgcatcaggattggctcaacggcaaggagtacaagtgcaaggtgtccaacaagggcctgccctcctccatcgagaagaccatctccaaggctaagggccaacctcgggagccccaagtgtataccctccctcccagccaggaggagatgaccaagaatcaagtgagcctgacctgcctcgtgaagggattttacccctccgacatcgctgtggaatgggaaagcaatggccaacctgagaacaactacaagaccacaccccccgtgctggactccgatggctccttcttcctgtacagcaggctgaccgtggacaaatcccggtggcaagagggaaacgtgttcagctgctccgtgatgcacgaggctctccacaaccactacacccagaagagcctctccctgagcctcggctagtaa

SEQ ID NO: 729 - DNA, 1344 bp, synthetic construct
  misc_feature 1..1344: note = 24D12.2H9 heavy chain DNA sequence
  source 1..1344: mol_type = other DNA
caggtgcagctgaagcagtcaggacctggcctagtgcagccctcacagagcctgtccatcacctgcacagtctctggtttctcattaactagctatggtgtacactgggttcgccaggctccaggaaagggtctggaatggctgggagtgatatggagtggtggaagcacagactataatgctgctttcatgtccagactgagcatcagcaaggacaactccaagagccaagttttctttaaaatgaacagtctgcaagctgatgacactgccatatactactgtgccaaaagccctgatggttacgacgtcgcctggtttggttactggggccaagggactctggtcactgtctctgcagctagcaccaagggccccagcgtgtttcctctcgctccctgcagccggagcacatccgagagcaccgctgctctgggctgtctcgtgaaggactacttccctgaacccgtcaccgtcagctggaatagcggcgccctgacatccggcgtccacacattccccgctgtcctgcagagcagcggcctgtacagcctgagctccgtggtcaccgtgcctagcagcagcctgggaacaaagacctacacctgcaacgtggaccataagccctccaacaccaaggtggacaagcgggtggaatccaagtatggacccccctgtcctccttgccctgctcctgaatttctcggaggcccctccgtcttcctgtttccccccaagcccaaggacaccctgatgatctcccggacacccgaagtcacctgcgtcgtggtggatgtcagccaggaagatcccgaggtgcagttcaactggtacgtggacggagtggaggtgcataacgccaaaaccaagcccagggaagagcagttcaacagcacctatcgggtcgtgtccgtgctcaccgtcctgcatcaggattggctcaacggcaaggagtacaagtgcaaggtgtccaacaagggcctgccctcctccatcgagaagaccatctccaaggctaagggccaacctcgggagccccaagtgtataccctccctcccagccaggaggagatgaccaagaatcaagtgagcctgacctgcctcgtgaagggattttacccctccgacatcgctgtggaatgggaaagcaatggccaacctgagaacaactacaagaccacaccccccgtgctggactccgatggctccttcttcctgtacagcaggctgaccgtggacaaatcccggtggcaagagggaaacgtgttcagctgctccgtgatgcacgaggctctccacaaccactacacccagaagagcctctccctgagcctcggctagtaa

SEQ ID NO: 730 - DNA, 1350 bp, synthetic construct
  misc_feature 1..1350: note = F846C.1B2 heavy chain DNA sequence
  source 1..1350: mol_type = other DNA
cagatccagttggtgcagtctggacctgagctgaagaagcctggagagacagtcaagatctcctgcaaggcttctgggtataccttcacaaactatggaatgaattgggtgaagcaggctccaggaaagggtttaaagtggatgggctggataaacacctacactggagagccatcatatgctgatgacttcaagggacggtttgccttctctttggaaacctctgccagcactgcctatttgcagatcaacaacctcaaaaatgaggacatggctacatatttctgtgcaagatgggggggttacgctggggattactatgctatggacttctggggtcaaggaacctcagtcaccgtctcctcagctagcaccaagggccccagcgtgtttcctctcgctccctgcagccggagcacatccgagagcaccgctgctctgggctgtctcgtgaaggactacttccctgaacccgtcaccgtcagctggaatagcggcgccctgacatccggcgtccacacattccccgctgtcctgcagagcagcggcctgtacagcctgagctccgtggtcaccgtgcctagcagcagcctgggaacaaagacctacacctgcaacgtggaccataagccctccaacaccaaggtggacaagcgggtggaatccaagtatggacccccctgtcctccttgccctgctcctgaatttctcggaggcccctccgtcttcctgtttccccccaagcccaaggacaccctgatgatctcccggacacccgaagtcacctgcgtcgtggtggatgtcagccaggaagatcccgaggtgcagttcaactggtacgtggacggagtggaggtgcataacgccaaaaccaagcccagggaagagcagttcaacagcacctatcgggtcgtgtccgtgctcaccgtcctgcatcaggattggctcaacggcaaggagtacaagtgcaaggtgtccaacaagggcctgccctcctccatcgagaagaccatctccaaggctaagggccaacctcgggagccccaagtgtataccctccctcccagccaggaggagatgaccaagaatcaagtgagcctgacctgcctcgtgaagggattttacccctccgacatcgctgtggaatgggaaagcaatggccaacctgagaacaactacaagaccacaccccccgtgctggactccgatggctccttcttcctgtacagcaggctgaccgtggacaaatcccggtggcaagagggaaacgtgttcagctgctccgtgatgcacgaggctctccacaaccactacacccagaagagcctctccctgagcctcggctagtaa

SEQ ID NO: 731 - DNA, 1350 bp, synthetic construct
  misc_feature 1..1350: note = F846C.1F5 heavy chain DNA sequence
  source 1..1350: mol_type = other DNA
cagatccagttggtgcagtctggacctgagctgaagaagcctggagagacagtcaagatctcctgcaaggcttctgggtataccttcacaaactatggaatgaactgggtgaagcaggctccaggaaagggtttaaagtggatgggctggataaacacctacactggagagccatcatatgctgatgacttcaagggacggtttgccttctctttggaaacctctgccagcactgcctatttgcagatcaacaacctcaaaaatgaggacatggctacatatttctgtgcaagatgggggggttacgatggggattactatgctatggactactggggtcaaggaacctcagtcaccgtctcctcagctagcaccaagggccccagcgtgtttcctctcgctccctgcagccggagcacatccgagagcaccgctgctctgggctgtctcgtgaaggactacttccctgaacccgtcaccgtcagctggaatagcggcgccctgacatccggcgtccacacattccccgctgtcctgcagagcagcggcctgtacagcctgagctccgtggtcaccgtgcctagcagcagcctgggaacaaagacctacacctgcaacgtggaccataagccctccaacaccaaggtggacaagcgggtggaatccaagtatggacccccctgtcctccttgccctgctcctgaatttctcggaggcccctccgtcttcctgtttccccccaagcccaaggacaccctgatgatctcccggacacccgaagtcacctgcgtcgtggtggatgtcagccaggaagatcccgaggtgcagttcaactggtacgtggacggagtggaggtgcataacgccaaaaccaagcccagggaagagcagttcaacagcacctatcgggtcgtgtccgtgctcaccgtcctgcatcaggattggctcaacggcaaggagtacaagtgcaaggtgtccaacaagggcctgccctcctccatcgagaagaccatctccaaggctaagggccaacctcgggagccccaagtgtataccctccctcccagccaggaggagatgaccaagaatcaagtgagcctgacctgcctcgtgaagggattttacccctccgacatcgctgtggaatgggaaagcaatggccaacctgagaacaactacaagaccacaccccccgtgctggactccgatggctccttcttcctgtacagcaggctgaccgtggacaaatcccggtggcaagagggaaacgtgttcagctgctccgtgatgcacgaggctctccacaaccactacacccagaagagcctctccctgagcctcggctagtaa

SEQ ID NO: 732 - DNA, 1350 bp, synthetic construct
  misc_feature 1..1350: note = F846C.1H12 heavy chain DNA sequence
  source 1..1350: mol_type = other DNA
cagatccagttggtgcagtctggacctgagctgaagaagcctggagagacagtcaagatctcctgcaaggcttctgggtataccttcacaaactttggaatgaactgggtgaagcaggctccaggaaagggtttaaagtggatgggctggataaacacctacactggagagccatcatatgctgatgacttcaagggacggtttgccttctctttggaaacctctgccagcactgcctatttgcagatcaacaacctcaaaaatgaggacattgctacatatttctgtgcaagatgggggggttacgctggggattactatgctatggactactggggtcaaggaacctcagtcaccgtctcctcagctagcaccaagggccccagcgtgtttcctctcgctccctgcagccggagcacatccgagagcaccgctgctctgggctgtctcgtgaaggactacttccctgaacccgtcaccgtcagctggaatagcggcgccctgacatccggcgtccacacattccccgctgtcctgcagagcagcggcctgtacagcctgagctccgtggtcaccgtgcctagcagcagcctgggaacaaagacctacacctgcaacgtggaccataagccctccaacaccaaggtggacaagcgggtggaatccaagtatggacccccctgtcctccttgccctgctcctgaatttctcggaggcccctccgtcttcctgtttccccccaagcccaaggacaccctgatgatctcccggacacccgaagtcacctgcgtcgtggtggatgtcagccaggaagatcccgaggtgcagttcaactggtacgtggacggagtggaggtgcataacgccaaaaccaagcccagggaagagcagttcaacagcacctatcgggtcgtgtccgtgctcaccgtcctgcatcaggattggctcaacggcaaggagtacaagtgcaaggtgtccaacaagggcctgccctcctccatcgagaagaccatctccaaggctaagggccaacctcgggagccccaagtgtataccctccctcccagccaggaggagatgaccaagaatcaagtgagcctgacctgcctcgtgaagggattttacccctccgacatcgctgtggaatgggaaagcaatggccaacctgagaacaactacaagaccacaccccccgtgctggactccgatggctccttcttcctgtacagcaggctgaccgtggacaaatcccggtggcaagagggaaacgtgttcagctgctccgtgatgcacgaggctctccacaaccactacacccagaagagcctctccctgagcctcggctagtaa

SEQ ID NO: 733 - DNA, 1332 bp, synthetic construct
  misc_feature 1..1332: note = F846C.1H5 heavy chain DNA sequence
  source 1..1332: mol_type = other DNA
gaggtccagctgttggagtctgggggaggcttagtgaagcctggagggtccctgaaactctcctgtgcagcctctggattcactttcagcagctatgccatgtcttgggttcgccagactccagagaagaggctggagtgggtcgcatccattagtagtggtggtgacacctactatccagacagtgtgaagggccgattcaccatctctagagataatgccaggaacatcctgtacctgcaaatgagcagtctgaggtctgaggacacggccatgtattactgtgcaagttatggtaactccctctttgactactggggccaaggcaccactctcacagtctcctcagctagcaccaagggccccagcgtgtttcctctcgctccctgcagccggagcacatccgagagcaccgctgctctgggctgtctcgtgaaggactacttccctgaacccgtcaccgtcagctggaatagcggcgccctgacatccggcgtccacacattccccgctgtcctgcagagcagcggcctgtacagcctgagctccgtggtcaccgtgcctagcagcagcctgggaacaaagacctacacctgcaacgtggaccataagccctccaacaccaaggtggacaagcgggtggaatccaagtatggacccccctgtcctccttgccctgctcctgaatttctcggaggcccctccgtcttcctgtttccccccaagcccaaggacaccctgatgatctcccggacacccgaagtcacctgcgtcgtggtggatgtcagccaggaagatcccgaggtgcagttcaactggtacgtggacggagtggaggtgcataacgccaaaaccaagcccagggaagagcagttcaacagcacctatcgggtcgtgtccgtgctcaccgtcctgcatcaggattggctcaacggcaaggagtacaagtgcaaggtgtccaacaagggcctgccctcctccatcgagaagaccatctccaaggctaagggccaacctcgggagccccaagtgtataccctccctcccagccaggaggagatgaccaagaatcaagtgagcctgacctgcctcgtgaagggattttacccctccgacatcgctgtggaatgggaaagcaatggccaacctgagaacaactacaagaccacaccccccgtgctggactccgatggctccttcttcctgtacagcaggctgaccgtggacaaatcccggtggcaagagggaaacgtgttcagctgctccgtgatgcacgaggctctccacaaccactacacccagaagagcctctccctgagcctcggctagtaa

SEQ ID NO: 734 - DNA, 1350 bp, synthetic construct; identical to SEQ ID NO: 731
  misc_feature 1..1350: note = F846C.2H3 heavy chain DNA sequence
  source 1..1350: mol_type = other DNA

SEQ ID NO: 735 - DNA, 1326 bp, synthetic construct
  misc_feature 1..1326: note = F846TC.14A2 heavy chain DNA sequence
  source 1..1326: mol_type = other DNA
cagatccagttggtgcagtctggacctgagctgaagaagcctggagagacagtcaagatctcctgcaaggcttctgggtataccttcacaaactatggaatgaactgggtgaagcaggctccaggaaagggtttaaagtggatgggctggataaacacctacactggagagccaacatatgctggtgacctcaagggacggtttgccttctctttggaaacctctgccagcactgcctatttgcagatcaacaacctcaaaaatgaggacacggctacatatttctgtgtaagatatactatggactactggggtcaaggaacctcagtcaccgtctcctcagctagcaccaagggccccagcgtgtttcctctcgctccctgcagccggagcacatccgagagcaccgctgctctgggctgtctcgtgaaggactacttccctgaacccgtcaccgtcagctggaatagcggcgccctgacatccggcgtccacacattccccgctgtcctgcagagcagcggcctgtacagcctgagctccgtggtcaccgtgcctagcagcagcctgggaacaaagacctacacctgcaacgtggaccataagccctccaacaccaaggtggacaagcgggtggaatccaagtatggacccccctgtcctccttgccctgctcctgaatttctcggaggcccctccgtcttcctgtttccccccaagcccaaggacaccctgatgatctcccggacacccgaagtcacctgcgtcgtggtggatgtcagccaggaagatcccgaggtgcagttcaactggtacgtggacggagtggaggtgcataacgccaaaaccaagcccagggaagagcagttcaacagcacctatcgggtcgtgtccgtgctcaccgtcctgcatcaggattggctcaacggcaaggagtacaagtgcaaggtgtccaacaagggcctgccctcctccatcgagaagaccatctccaaggctaagggccaacctcgggagccccaagtgtataccctccctcccagccaggaggagatgaccaagaatcaagtgagcctgacctgcctcgtgaagggattttacccctccgacatcgctgtggaatgggaaagcaatggccaacctgagaacaactacaagaccacaccccccgtgctggactccgatggctccttcttcctgtacagcaggctgaccgtggacaaatcccggtggcaagagggaaacgtgttcagctgctccgtgatgcacgaggctctccacaaccactacacccagaagagcctctccctgagcctcggctagtaa

SEQ ID NO: 736 - DNA, 1356 bp, synthetic construct
  misc_feature 1..1356: note = F846TC.14E4 heavy chain DNA sequence
  source 1..1356: mol_type = other DNA
caggttactctgaaagagtctggccctgggatattgcagccctcccagaccctcagtctgacttgttctttctctgggttttcactgagcacttctggtatgggtgtaggctggattcgtcagccttcagggaagggtctggagtggctggcacacatttggtgggatgatgataagtactataacacagccctgaagagcgggctcacaatctccaaggatgcctccaaaaaccaggtcttcctcaagatcgccagtatggacactgcagatactgccacatactactgtgctcgaaacctctatgatggttcctacgggtactatgctatggactactggggtcaaggaacctcagtcaccgtctcctcagctagcaccaagggccccagcgtgtttcctctcgctccctgcagccggagcacatccgagagcaccgctgctctgggctgtctcgtgaaggactacttccctgaacccgtcaccgtcagctggaatagcggcgccctgacatccggcgtccacacattccccgctgtcctgcagagcagcggcctgtacagcctgagctccgtggtcaccgtgcctagcagcagcctgggaacaaagacctacacctgcaacgtggaccataagccctccaacaccaaggtggacaagcgggtggaatccaagtatggacccccctgtcctccttgccctgctcctgaatttctcggaggcccctccgtcttcctgtttccccccaagcccaaggacaccctgatgatctcccggacacccgaagtcacctgcgtcgtggtggatgtcagccaggaagatcccgaggtgcagttcaactggtacgtggacggagtggaggtgcataacgccaaaaccaagcccagggaagagcagttcaacagcacctatcgggtcgtgtccgtgctcaccgtcctgcatcaggattggctcaacggcaaggagtacaagtgcaaggtgtccaacaagggcctgccctcctccatcgagaagaccatctccaaggctaagggccaacctcgggagccccaagtgtataccctccctcccagccaggaggagatgaccaagaatcaagtgagcctgacctgcctcgtgaagggattttacccctccgacatcgctgtggaatgggaaagcaatggccaacctgagaacaactacaagaccacaccccccgtgctggactccgatggctccttcttcctgtacagcaggctgaccgtggacaaatcccggtggcaagagggaaacgtgttcagctgctccgtgatgcacgaggctctccacaaccactacacccagaagagcctctccctgagcctcggctagtaa

SEQ ID NO: 737 - DNA, 1350 bp, synthetic construct
  misc_feature 1..1350: note = F846TC.16B5 heavy chain DNA sequence
  source 1..1350: mol_type = other DNA
cagatccagttggtgcagtctggacctgagctgaagaagcctggagagacagtcaagatctcctgcaaggcttctgggtataccttcacaaactatggaatgaactgggtgaagcaggctccaggaaagggtttaaagtggatgggctggataaacacctacactggagagccagcatatgctgatgacttcaagggacggtttgccttctctttggaaacctctgccagcactgcctatttgcagatcaacaacctcaaaaatgaggacatggctacatatttctgtgcaagatgggggggttacgatggggattactatgctatggactactggggtcaaggaacctcagtcaccgtctcctcagctagcaccaagggccccagcgtgtttcctctcgctccctgcagccggagcacatccgagagcaccgctgctctgggctgtctcgtgaaggactacttccctgaacccgtcaccgtcagctggaatagcggcgccctgacatccggcgtccacacattccccgctgtcctgcagagcagcggcctgtacagcctgagctccgtggtcaccgtgcctagcagcagcctgggaacaaagacctacacctgcaacgtggaccataagccctccaacaccaaggtggacaagcgggtggaatccaagtatggacccccctgtcctccttgccctgctcctgaatttctcggaggcccctccgtcttcctgtttccccccaagcccaaggacaccctgatgatctcccggacacccgaagtcacctgcgtcgtggtggatgtcagccaggaagatcccgaggtgcagttcaactggtacgtggacggagtggaggtgcataacgccaaaaccaagcccagggaagagcagttcaacagcacctatcgggtcgtgtccgtgctcaccgtcctgcatcaggattggctcaacggcaaggagtacaagtgcaaggtgtccaacaagggcctgccctcctccatcgagaagaccatctccaaggctaagggccaacctcgggagccccaagtgtataccctccctcccagccaggaggagatgaccaagaatcaagtgagcctgacctgcctcgtgaagggattttacccctccgacatcgctgtggaatgggaaagcaatggccaacctgagaacaactacaagaccacaccccccgtgctggactccgatggctccttcttcctgtacagcaggctgaccgtggacaaatcccggtggcaagagggaaacgtgttcagctgctccgtgatgcacgaggctctccacaaccactacacccagaagagcctctccctgagcctcggctagtaa

SEQ ID NO: 738 - DNA, 1353 bp, synthetic construct
  misc_feature 1..1353: note = F846TC.7F10 heavy chain DNA sequence
  source 1..1353: mol_type = other DNA
gaagtgcagctggtggagtctgggggagacttagtgaagcctggagggtccctgaaactctcctgtgcagcctctggattcactttcagtaactatggcttgtcttggattcgccagactccagacaagaggctggagtgggtcgcaaccattagtagtggtggtagttacacctactatcctgacagtgtgaaggggcgattcaccatctccagagacagtgccaagaacaccctgtacctgcaaatgagcagtctgaagtctgaggacacagccatgtattactgtgcaagacatgcgcattactacggtgttagcccgtactactttgactactggggccaaggcacctgtctcacagtctcctcagctagcaccaagggccccagcgtgtttcctctcgctccctgcagccggagcacatccgagagcaccgctgctctgggctgtctcgtgaaggactacttccctgaacccgtcaccgtcagctggaatagcggcgccctgacatccggcgtccacacattccccgctgtcctgcagagcagcggcctgtacagcctgagctccgtggtcaccgtgcctagcagcagcctgggaacaaagacctacacctgcaacgtggaccataagccctccaacaccaaggtggacaagcgggtggaatccaagtatggacccccctgtcctccttgccctgctcctgaatttctcggaggcccctccgtcttcctgtttccccccaagcccaaggacaccctgatgatctcccggacacccgaagtcacctgcgtcgtggtggatgtcagccaggaagatcccgaggtgcagttcaactggtacgtggacggagtggaggtgcataacgccaaaaccaagcccagggaagagcagttcaacagcacctatcgggtcgtgtccgtgctcaccgtcctgcatcaggattggctcaacggcaaggagtacaagtgcaaggtgtccaacaagggcctgccctcctccatcgagaagaccatctccaaggctaagggccaacctcgggagccccaagtgtataccctccctcccagccaggaggagatgaccaagaatcaagtgagcctgacctgcctcgtgaagggattttacccctccgacatcgctgtggaatgggaaagcaatggccaacctgagaacaactacaagaccacaccccccgtgctggactccgatggctccttcttcctgtacagcaggctgaccgtggacaaatcccggtggcaagagggaaacgtgttcagctgctccgtgatgcacgaggctctccacaaccactacacccagaagagcctctccctgagcctcggctagtaa

SEQ ID NO: 739 - DNA, 1341 bp, synthetic construct
  misc_feature 1..1341: note = F847C.10B9 heavy chain DNA sequence
  source 1..1341: mol_type = other DNA
cagatccagttggtgcagtctggacctgaggtgaagaagcctggagagacagtcaagatctcctgcaaggcttctgggtatatcttcacaaactatggaatgaactgggtgaagcaggctccaggaaagggtttaaagtggatgggctggataaacacctacactggagagccaacatatactgatgacttcaagggacggtttgccttctctttggaaacctctgccagcactgcctatttgcagatcaacaacctcaaaaatgaggacacggctacatatttctgtgcaaagtttggtaactacgtgggagctatggactactggggtcaaggaacctcagtcaccgtctcctcagctagcaccaagggccccagcgtgtttcctctcgctccctgcagccggagcacatccgagagcaccgctgctctgggctgtctcgtgaaggactacttccctgaacccgtcaccgtcagctggaatagcggcgccctgacatccggcgtccacacattccccgctgtcctgcagagcagcggcctgtacagcctgagctccgtggtcaccgtgcctagcagcagcctgggaacaaagacctacacctgcaacgtggaccataagccctccaacaccaaggtggacaagcgggtggaatccaagtatggacccccctgtcctccttgccctgctcctgaatttctcggaggcccctccgtcttcctgtttccccccaagcccaaggacaccctgatgatctcccggacacccgaagtcacctgcgtcgtggtggatgtcagccaggaagatcccgaggtgcagttcaactggtacgtggacggagtggaggtgcataacgccaaaaccaagcccagggaagagcagttcaacagcacctatcgggtcgtgtccgtgctcaccgtcctgcatcaggattggctcaacggcaaggagtacaagtgcaaggtgtccaacaagggcctgccctcctccatcgagaagaccatctccaaggctaagggccaacctcgggagccccaagtgtataccctccctcccagccaggaggagatgaccaagaatcaagtgagcctgacctgcctcgtgaagggattttacccctccgacatcgctgtggaatgggaaagcaatggccaacctgagaacaactacaagaccacaccccccgtgctggactccgatggctccttcttcctgtacagcaggctgaccgtggacaaatcccggtggcaagagggaaacgtgttcagctgctccgtgatgcacgaggctctccacaaccactacacccagaagagcctctccctgagcctcggctagtaa

SEQ ID NO: 740 - DNA, 1344 bp, synthetic construct
  misc_feature 1..1344: note = F847C.11B1 heavy chain DNA sequence
  source 1..1344: mol_type = other DNA
gaggtccagcttcagcagtctggacctgagctggtgaaacctggggcctcagtgaagatatcctgcaaggcttctggaaacacattcactgaccacaacatgcactgggtgaagcagagccatggaaagagccttgagtggattggatatatttatccttacaatggtggtactggctacaaccagaagttcaagagcaaggccacattgactgtagacaattcctccagcacagtctacatggagctccgcagcctgacatctgaggactctgcagtctattactgtgcaagaggggagtatgattacctggcctggtttgcttactggggccaagggactctggtcactgtctctgcagctagcaccaagggccccagcgtgtttcctctcgctccctgcagccggagcacatccgagagcaccgctgctctgggctgtctcgtgaaggactacttccctgaacccgtcaccgtcagctggaatagcggcgccctgacatccggcgtccacacattccccgctgtcctgcagagcagcggcctgtacagcctgagctccgtggtcaccgtgcctagcagcagcctgggaacaaagacctacacctgcaacgtggaccataagccctccaacaccaaggtggacaagcgggtggaatccaagtatggacccccctgtcctccttgccctgctcctgaatttctcggaggcccctccgtcttcctgtttccccccaagcccaaggacaccctgatgatctcccggacacccgaagtcacctgcgtcgtggtggatgtcagccaggaagatcccgaggtgcagttcaactggtacgtggacggagtggaggtgcataacgccaaaaccaagcccagggaagagcagttcaacagcacctatcgggtcgtgtccgtgctcaccgtcctgcatcaggattggctcaacggcaaggagtacaagtgcaaggtgtccaacaagggcctgccctcctccatcgagaagaccatctccaaggctaagggccaacctcgggagccccaagtgtataccctccctcccagccaggaggagatgaccaagaatcaagtgagcctgacctgcctcgtgaagggattttacccctccgacatcgctgtggaatgggaaagcaatggccaacctgagaacaactacaagaccacaccccccgtgctggactccgatggctccttcttcctgtacagcaggctgaccgtggacaaatcccggtggcaagagggaaacgtgttcagctgctccgtgatgcacgaggctctccacaaccactacacccagaagagcctctccctgagcctcggctagtaa

SEQ ID NO: 741 - DNA, 1341 bp, synthetic construct
  misc_feature 1..1341: note = F847C.12F12 heavy chain DNA sequence
  source 1..1341: mol_type = other DNA
cagatccagttggtgcagtctggacctgagctgaagaagcctggagagacagtcaagatctcctgcaaggcttctgggtataccttcacaaactatggaatgaactgggtgaagcaggctccaggaaagggtttaaagtggatgggctggataaacacctacactggagagccaacatatgttgatgacttcaagggacggtttgccttctctttggaaacctctgccagcactgcctatttgcggatcaacaacctcaaaaatgaggacacggctacatatttctgtgcaaagtttggtaactacgtgggagctatggactactggggtcaaggaacctcagtcaccgtctcctcagctagcaccaagggccccagcgtgtttcctctcgctccctgcagccggagcacatccgagagcaccgctgctctgggctgtctcgtgaaggactacttccctgaacccgtcaccgtcagctggaatagcggcgccctgacatccggcgtccacacattccccgctgtcctgcagagcagcggcctgtacagcctgagctccgtggtcaccgtgcctagcagcagcctgggaacaaagacctacacctgcaacgtggaccataagccctccaacaccaaggtggacaagcgggtggaatccaagtatggacccccctgtcctccttgccctgctcctgaatttctcggaggcccctccgtcttcctgtttccccccaagcccaaggacaccctgatgatctcccggacacccgaagtcacctgcgtcgtggtggatgtcagccaggaagatcccgaggtgcagttcaactggtacgtggacggagtggaggtgcataacgccaaaaccaagcccagggaagagcagttcaacagcacctatcgggtcgtgtccgtgctcaccgtcctgcatcaggattggctcaacggcaaggagtacaagtgcaaggtgtccaacaagggcctgccctcctccatcgagaagaccatctccaaggctaagggccaacctcgggagccccaagtgtataccctccctcccagccaggaggagatgaccaagaatcaagtgagcctgacctgcctcgtgaagggattttacccctccgacatcgctgtggaatgggaaagcaatggccaacctgagaacaactacaagaccacaccccccgtgctggactccgatggctccttcttcctgtacagcaggctgaccgtggacaaatcccggtggcaagagggaaacgtgttcagctgctccgtgatgcacgaggctctccacaaccactacacccagaagagcctctccctgagcctcggctagtaa

SEQ ID NO: 742 - DNA, 1341 bp, synthetic construct; identical to SEQ ID NO: 739
  misc_feature 1..1341: note = F847C.26F5 heavy chain DNA sequence
  source 1..1341: mol_type = other DNA

SEQ ID NO: 743 - DNA, 1335 bp, synthetic construct
  misc_feature 1..1335: note = F847C.4B10 heavy chain DNA sequence
  source 1..1335: mol_type = other DNA
gaggtgcagcttgttgagactgggggaggcttagtgaagcctggagggtccctgaaactctcctgtgcagcctctggattcactttcagtagctatgccatgtcttgggttcgccagactccagagaagaggctggagtgggtcgcatccattagtagtggtggtagcacctactatccagacagtgtgaagggccgattcaccatctccagagataatgccaggaacatcctgtacctgcaaatgagcagtctgaggtctgaggacacggccatgtattactgtacaaggtttactacggtagtagagatggactactggggtcaaggaacctcagtcaccgtctcctcagctagcaccaagggccccagcgtgtttcctctcgctccctgcagccggagcacatccgagagcaccgctgctctgggctgtctcgtgaaggactacttccctgaacccgtcaccgtcagctggaatagcggcgccctgacatccggcgtccacacattccccgctgtcctgcagagcagcggcctgtacagcctgagctccgtggtcaccgtgcctagcagcagcctgggaacaaagacctacacctgcaacgtggaccataagccctccaacaccaaggtggacaagcgggtggaatccaagtatggacccccctgtcctccttgccctgctcctgaatttctcggaggcccctccgtcttcctgtttccccccaagcccaaggacaccctgatgatctcccggacacccgaagtcacctgcgtcgtggtggatgtcagccaggaagatcccgaggtgcagttcaactggtacgtggacggagtggaggtgcataacgccaaaaccaagcccagggaagagcagttcaacagcacctatcgggtcgtgtccgtgctcaccgtcctgcatcaggattggctcaacggcaaggagtacaagtgcaaggtgtccaacaagggcctgccctcctccatcgagaagaccatctccaaggctaagggccaacctcgggagccccaagtgtataccctccctcccagccaggaggagatgaccaagaatcaagtgagcctgacctgcctcgtgaagggattttacccctccgacatcgctgtggaatgggaaagcaatggccaacctgagaacaactacaagaccacaccccccgtgctggactccgatggctccttcttcctgtacagcaggctgaccgtggacaaatcccggtggcaagagggaaacgtgttcagctgctccgtgatgcacgaggctctccacaaccactacacccagaagagcctctccctgagcctcggctagtaa

SEQ ID NO: 744 - DNA, 1320 bp, synthetic construct
  misc_feature 1..1320: note = F849C.8D10 heavy chain DNA sequence
  source 1..1320: mol_type = other DNA
caggtccaactgcagcagactggtgctgagcttgtgaagcctggggcctcagtgaagctgtcctgcaaggcttctggctatactttcaccagctactggataaactgggtgaagcagaggcctggacaaggccttgagtggattggaaacatttatcctggtagtagtagtatttactacagtgagaagttcaagagtaaggccacactgactgtagacacatcctccagcacagcctacatgcagctcagcagcctgacatctgacgactctgcggtctattattgtgcaagatggggctactggggccaaggcaccactctcacagtctcctcagctagcaccaagggccccagcgtgtttcctctcgctccctgcagccggagcacatccgagagcaccgctgctctgggctgtctcgtgaaggactacttccctgaacccgtcaccgtcagctggaatagcggcgccctgacatccggcgtccacacattccccgctgtcctgcagagcagcggcctgtacagcctgagctccgtggtcaccgtgcctagcagcagcctgggaacaaagacctacacctgcaacgtggaccataagccctccaacaccaaggtggacaagcgggtggaatccaagtatggacccccctgtcctccttgccctgctcctgaatttctcggaggcccctccgtcttcctgtttccccccaagcccaaggacaccctgatgatctcccggacacccgaagtcacctgcgtcgtggtggatgtcagccaggaagatcccgaggtgcagttcaactggtacgtggacggagtggaggtgcataacgccaaaaccaagcccagggaagagcagttcaacagcacctatcgggtcgtgtccgtgctcaccgtcctgcatcaggattggctcaacggcaaggagtacaagtgcaaggtgtccaacaagggcctgccctcctccatcgagaagaccatctccaaggctaagggccaacctcgggagccccaagtgtataccctccctcccagccaggaggagatgaccaagaatcaagtgagcctgacctgcctcgtgaagggattttacccctccgacatcgctgtggaatgggaaagcaatggccaacctgagaacaactacaagaccacaccccccgtgctggactccgatggctccttcttcctgtacagcaggctgaccgtggacaaatcccggtggcaagagggaaacgtgttcagctgctccgtgatgcacgaggctctccacaaccactacacccagaagagcctctccctgagcctcggctagtaa

SEQ ID NO: 745 - DNA, 1347 bp, synthetic construct
  misc_feature 1..1347: note = F849C.8H3 heavy chain DNA sequence
  source 1..1347: mol_type = other DNA
caggttactctgaaagagtctggccctgggatattgcagccctcccagaccctcagtctgacttgttctttctctgggttttcactgagcacttttggtatgggtgtaggctggattcgtcagccttcagggaagggtctggagtggctggcacacatttggtgggatgatgataaacactataacccagccctgaagagccggctcacaatctccaaggatacctccaaaaaccaggtcttcctcaggatcgccaatgtggacactgcagataatgccacatattactgtgctcgaatcgactatggtgactacgtcgggtttgcttattggggccaagggactctggtcactgtctctgcagctagcaccaagggccccagcgtgtttcctctcgctccctgcagccggagcacatccgagagcaccgctgctctgggctgtctcgtgaaggactacttccctgaacccgtcaccgtcagctggaatagcggcgccctgacatccggcgtccacacattccccgctgtcctgcagagcagcggcctgtacagcctgagctccgtggtcaccgtgcctagcagcagcctgggaacaaagacctacacctgcaacgtggaccataagccctccaacaccaaggtggacaagcgggtggaatccaagtatggacccccctgtcctccttgccctgctcctgaatttctcggaggcccctccgtcttcctgtttccccccaagcccaaggacaccctgatgatctcccggacacccgaagtcacctgcgtcgtggtggatgtcagccaggaagatcccgaggtgcagttcaactggtacgtggacggagtggaggtgcataacgccaaaaccaagcccagggaagagcagttcaacagcacctatcgggtcgtgtccgtgctcaccgtcctgcatcaggattggctcaacggcaaggagtacaagtgcaaggtgtccaacaagggcctgccctcctccatcgagaagaccatctccaaggctaagggccaacctcgggagccccaagtgtataccctccctcccagccaggaggagatgaccaagaatcaagtgagcctgacctgcctcgtgaagggattttacccctccgacatcgctgtggaatgggaaagcaatggccaacctgagaacaactacaagaccacaccccccgtgctggactccgatggctccttcttcctgtacagcaggctgaccgtggacaaatcccggtggcaagagggaaacgtgttcagctgctccgtgatgcacgaggctctccacaaccactacacccagaagagcctctccctgagcctcggctagtaa

SEQ ID NO: 746 - DNA, 1338 bp, synthetic construct
  misc_feature 1..1338: note = 846.2B11 heavy chain DNA sequence
  source 1..1338: mol_type = other DNA
caggtccagctacagcagtctggacctgagctggtgaggcctggggctttagtgaagatttcctgcaaggcttctggttacaccttcacaagctacgatataaactgggtgaagcagaggcctggacagggacttgagtggattggatggatttatcctggagatggtagtactaaatataatgagaaattcaagggcaaggccacactgactgcagacaaatcctccagcacagcctacatgcagctcagcagcctgacttctgagaactctgcagtctatttctgtgcaagagaggcggcttctaatgctatggactactggggtcaaggaacctcagtcaccgtctcctcagctagcaccaagggccccagcgtgtttcctctcgctccctgcagccggagcacatccgagagcaccgctgctctgggctgtctcgtgaaggactacttccctgaacccgtcaccgtcagctggaatagcggcgccctgacatccggcgtccacacattccccgctgtcctgcagagcagcggcctgtacagcctgagctccgtggtcaccgtgcctagcagcagcctgggaacaaagacctacacctgcaacgtggaccataagccctccaacaccaaggtggacaagcgggtggaatccaagtatggacccccctgtcctccttgccctgctcctgaatttctcggaggcccctccgtcttcctgtttccccccaagcccaaggacaccctgatgatctcccggacacccgaagtcacctgcgtcgtggtggatgtcagccaggaagatcccgaggtgcagttcaactggtacgtggacggagtggaggtgcataacgccaaaaccaagcccagggaagagcagttcaacagcacctatcgggtcgtgtccgtgctcaccgtcctgcatcaggattggctcaacggcaaggagtacaagtgcaaggtgtccaacaagggcctgccctcctccatcgagaagaccatctccaaggctaagggccaacctcgggagccccaagtgtataccctccctcccagccaggaggagatgaccaagaatcaagtgagcctgacctgcctcgtgaagggattttacccctccgacatcgctgtggaatgggaaagcaatggccaacctgagaacaactacaagaccacaccccccgtgctggactccgatggctccttcttcctgtacagcaggctgaccgtggacaaatcccggtggcaagagggaaacgtgttcagctgctccgtgatgcacgaggctctccacaaccactacacccagaagagcctctccctgagcctcggctagtaa

SEQ ID NO: 747 - DNA, 1350 bp, synthetic construct
  misc_feature 1..1350: note = 846.4D5 heavy chain DNA sequence
  source 1..1350: mol_type = other DNA
gaagtgaagcttgaggagtctggaggaggcttggtgcaacctggaggatccatgaaactctcctgtgttgcctctggattcactttcagtaactactggatgaactgggtccgccagtctccagagaaggggcttgagtgggttgctgaaattagattgaaatctaataattatgcaacacattatgcggagtctgtgaaagggaggttcaccatctcaagagatgattccaaaagtagtgtctacctgcaaatgaacaacttaagagctgaagacactggcatttattactgtaccaggcactacggctttccctactggtacttcgatgtctggggcgcagggaccacggtcaccgtctcctcagctagcaccaagggccccagcgtgtttcctctcgctccctgcagccggagcacatccgagagcaccgctgctctgggctgtctcgtgaaggactacttccctgaacccgtcaccgtcagctggaatagcggcgccctgacatccggcgtccacacattccccgctgtcctgcagagcagcggcctgtacagcctgagctccgtggtcaccgtgcctagcagcagcctgggaacaaagacctacacctgcaacgtggaccataagccctccaacaccaaggtggacaagcgggtggaatccaagtatggacccccctgtcctccttgccctgctcctgaatttctcggaggcccctccgtcttcctgtttccccccaagcccaaggacaccctgatgatctcccggacacccgaagtcacctgcgtcgtggtggatgtcagccaggaagatcccgaggtgcagttcaactggtacgtggacggagtggaggtgcataacgccaaaaccaagcccagggaagagcagttcaacagcacctatcgggtcgtgtccgtgctcaccgtcctgcatcaggattggctcaacggcaaggagtacaagtgcaaggtgtccaacaagggcctgccctcctccatcgagaagaccatctccaaggctaagggccaacctcgggagccccaagtgtataccctccctcccagccaggaggagatgaccaagaatcaagtgagcctgacctgcctcgtgaagggattttacccctccgacatcgctgtggaatgggaaagcaatggccaacctgagaacaactacaagaccacaccccccgtgctggactccgatggctccttcttcctgtacagcaggctgaccgtggacaaatcccggtggcaagagggaaacgtgttcagctgctccgtgatgcacgaggctctccacaaccactacacccagaagagcctctccctgagcctcggctagtaa

SEQ ID NO: 748 - DNA, 1338 bp, synthetic construct
  misc_feature 1..1338: note = 846T.1H2 heavy chain DNA sequence
  source 1..1338: mol_type = other DNA
cagatccagttggtgcagtctggacctgagctgaagaagcctggagagacagtcaagatctcctgcaaggcttctgggtataccttcacaaactatggaatgaactgggtgaagcaggctccaggaaagggtttaaagtggatgggctggataaacaccaacactggagagccaacatatgctgaagagttcaagggacggtttgccttctctttggaaacctctgccagcactgcctatttgcagatcaacaacctcaaaaatgaggacacggctacatatttctgtgcaaccggggggggtaactgggactttgactactggggccaaggcaccactctcacagtctcctcagctagcaccaagggccccagcgtgtttcctctcgctccctgcagccggagcacatccgagagcaccgctgctctgggctgtctcgtgaaggactacttccctgaacccgtcaccgtcagctggaatagcggcgccctgacatccggcgtccacacattccccgctgtcctgcagagcagcggcctgtacagcctgagctccgtggtcaccgtgcctagcagcagcctgggaacaaagacctacacctgcaacgtggaccataagccctccaacaccaaggtggacaagcgggtggaatccaagtatggacccccctgtcctccttgccctgctcctgaatttctcggaggcccctccgtcttcctgtttccccccaagcccaaggacaccctgatgatctcccggacacccgaagtcacctgcgtcgtggtggatgtcagccaggaagatcccgaggtgcagttcaactggtacgtggacggagtggaggtgcataacgccaaaaccaagcccagggaagagcagttcaacagcacctatcgggtcgtgtccgtgctcaccgtcctgcatcaggattggctcaacggcaaggagtacaagtgcaaggtgtccaacaagggcctgccctcctccatcgagaagaccatctccaaggctaagggccaacctcgggagccccaagtgtataccctccctcccagccaggaggagatgaccaagaatcaagtgagcctgacctgcctcgtgaagggattttacccctccgacatcgctgtggaatgggaaagcaatggccaacctgagaacaactacaagaccacaccccccgtgctggactccgatggctccttcttcctgtacagcaggctgaccgtggacaaatcccggtggcaagagggaaacgtgttcagctgctccgtgatgcacgaggctctccacaaccactacacccagaagagcctctccctgagcctcggctagtaa

SEQ ID NO: 749 - DNA, 1326 bp, synthetic construct
  misc_feature 1..1326: note = 847.14H4 heavy chain DNA sequence
  source 1..1326: mol_type = other DNA
cagatccagttggtgcagtctggacctgaactgacgaagcctggagagacagtcaagatctcctgtaaggcttctggctataccttcacagactatggaatgaactgggtgaggcaggctccaggagagactttaaagtggatgggctggataaacacctacactggagagccaacatatgctgatgacttcaaggggcggtttgccttctctttggaatcctctgccagcactgcctatttgcagatcaacaacctcaaaaatgaggacgtggctacatatttctgtgcaagataccctatggactactggggtcaaggaacctcagtcaccgtctcctcagctagcaccaagggccccagcgtgtttcctctcgctccctgcagccggagcacatccgagagcaccgctgctctgggctgtctcgtgaaggactacttccctgaacccgtcaccgtcagctggaatagcggcgccctgacatccggcgtccacacattccccgctgtcctgcagagcagcggcctgtacagcctgagctccgtggtcaccgtgcctagcagcagcctgggaacaaagacctacacctgcaacgtggaccataagccctccaacaccaaggtggacaagcgggtggaatccaagtatggacccccctgtcctccttgccctgctcctgaatttctcggaggcccctccgtcttcctgtttccccccaagcccaaggacaccctgatgatctcccggacacccgaagtcacctgcgtcgtggtggatgtcagccaggaagatcccgaggtgcagttcaactggtacgtggacggagtggaggtgcataacgccaaaaccaagcccagggaagagcagttcaacagcacctatcgggtcgtgtccgtgctcaccgtcctgcatcaggattggctcaacggcaaggagtacaagtgcaaggtgtccaacaagggcctgccctcctccatcgagaagaccatctccaaggctaagggccaacctcgggagccccaagtgtataccctccctcccagccaggaggagatgaccaagaatcaagtgagcctgacctgcctcgtgaagggattttacccctccgacatcgctgtggaatgggaaagcaatggccaacctgagaacaactacaagaccacaccccccgtgctggactccgatggctccttcttcctgtacagcaggctgaccgtggacaaatcccggtggcaagagggaaacgtgttcagctgctccgtgatgcacgaggctctccacaaccactacacccagaagagcctctccctgagcctcggctagtaa

SEQ ID NO: 750 - DNA, 663 bp, synthetic construct
  misc_feature 1..663: note = TB001 light chain DNA sequence
  source 1..663: mol_type = other DNA
gacatcgtgctgacccagtctccactgagcctgcctgttacacctggcgagccagcctccatctcctgcagatcctctaagtccctgctgtacaaggacggcaagacctacctgaactggttcctgcagaagcccggccagtctcctcagctcctgatctacctgatgagcacccatgcctctggcgtgcccgatagattttccggctctggctctggcaccgacttcaccctgaagatctccagagtggaagccgaggacgtgggcgtgtactactgtcagcagctggtggactaccctctgacctttggcggcggaacaaagctggaaatcaagcggacagtggccgctccttccgtgttcatcttcccaccttccgacgagcagctgaagtccggcacagcttctgtcgtgtgcctgctgaacaacttctaccctcgggaagccaaggtgcagtggaaggtggacaatgccctgcagtccggcaactcccaagagtctgtgaccgagcaggactccaaggacagcacctacagcctgtcctccacactgaccctgtccaaggccgactacgagaagcacaaggtgtacgcctgcgaagtgacccatcagggcctgtctagccctgtgaccaagtctttcaaccggggcgagtgctgatga

SEQ ID NO: 751 - DNA, 660 bp, synthetic construct
  misc_feature 1..660: note = TB006 light chain DNA sequence
  source 1..660: mol_type = other DNA
gatatagtgatgacccaaacacctttgtccctgtcagtcaccccaggccaacccgcatctatctcatgcaaatcctcaaaaagtcttttgcactctgacgggataacatatctctactggtatcttcaaaaacctggtcagtccccccagctcttgatctatagaatgagtaaccttgcctctggtgtccccgaccggtttagtggaagcgggtctgggaccgacttcaccctcaagattagtcgcgtcgaagccgaagatgtgggagtgtattactgtgcccagatgctcgaatttcccctgacatttggtcaaggaactaaattggagattaagcggaccgtggccgcccccagcgtgttcatcttccctcccagcgacgagcagctgaagtctggcaccgccagcgtggtgtgcctgctgaacaacttctacccccgcgaggccaaggtgcagtggaaggtggacaacgccctgcagagcggcaacagccaggagagcgtgaccgagcaggactccaaggacagcacctacagcctgagcagcaccctgaccctgagcaaggccgactacgagaagcacaaggtgtacgcctgcgaggtgacccaccagggactgtctagccccgtgaccaagagcttcaaccggggcgagtgctaa

SEQ ID NO: 752 - DNA, 645 bp, synthetic construct
  misc_feature 1..645: note = 12G5.D7 light chain DNA sequence
  source 1..645: mol_type = other DNA
gacatcctgatgacccaatctccatcctccatgtctgtatctctgggagacacagtcagcatcacttgccatgcaagtcagggcattaactctaatatggggtggttgcagcagaaaccagggaaatcatttaagggcctgatctatcatgcaaccaacttggaagatggagttccatcaaggttcagtggcagtggatctggagcagattattctctcaccatcagcagcctggaatctgaagattttgcagactattactgtgtacagtatgctcagtttcctcctacgttcggatcggggaccaagctggaaataaaacggaccgtggccgcccccagcgtgttcatcttccctcccagcgacgagcagctgaagtctggcaccgccagcgtggtgtgcctgctgaacaacttctacccccgcgaggccaaggtgcagtggaaggtggacaacgccctgcagagcggcaacagccaggagagcgtgaccgagcaggactccaaggacagcacctacagcctgagcagcaccctgaccctgagcaaggccgactacgagaagcacaaggtgtacgcctgcgaggtgacccaccagggactgtctagccccgtgaccaagagcttcaaccggggcgagtgctaa

SEQ ID NO: 753 - DNA, 660 bp, synthetic construct
  misc_feature 1..660: note = 13A12.2E5 light chain DNA sequence
  source 1..660: mol_type = other DNA
gatgttgtgatgacccagactccactcactttgtcggttgccattggacaaccagcttccatctcttgcaagtcgagtcagagcctcttatatactaatggaaaaacctatttgaattggttattacagaggccaggccagtctccaaaacgcctaatctatctgctgtctaaattggactctggagtccctgacaggttcagtgccagtggatcagggacagatttcacactgaaaatcagcagagtggaggctgaggatttgggagtttattactgcttgcagagtacacattttccgctcacgttcggtgctgggaccaagctggagatgaaacggaccgtggccgcccccagcgtgttcatcttccctcccagcgacgagcagctgaagtctggcaccgccagcgtggtgtgcctgctgaacaacttctacccccgcgaggccaaggtgcagtggaaggtggacaacgccctgcagagcggcaacagccaggagagcgtgaccgagcaggactccaaggacagcacctacagcctgagcagcaccctgaccctgagcaaggccgactacgagaagcacaaggtgtacgcctgcgaggtgacccaccagggactgtctagccccgtgaccaagagcttcaaccggggcgagtgctaa

SEQ ID NO: 754 - DNA, 660 bp, synthetic construct
  misc_feature 1..660: note = 14H10.2C9 light chain DNA sequence
  source 1..660: mol_type = other DNA
gatgttgtgatgacccagactccactcactttgtcggttaccattggacaaccagcctccatctcttgcaagtcaagtcagagcctcttcgatagtgatggaaagacatatttgaattggttgttacagaggccaggccagtctccaaagcgcctaatctatctggtgtctaaactggactctggagtccctgacaggttcactggcagtggatcagggacagatttcacactgaaaatcagcagagtggaggctgaggatttgggagtttattattgctggcaaggtacacattttcctctcacgttcggtgctgggaccaagctggaaatgaaacggaccgtggccgcccccagcgtgttcatcttccctcccagcgacgagcagctgaagtctggcaccgccagcgtggtgtgcctgctgaacaacttctacccccgcgaggccaaggtgcagtggaaggtggacaacgccctgcagagcggcaacagccaggagagcgtgaccgagcaggactccaaggacagcacctacagcctgagcagcaccctgaccctgagcaaggccgactacgagaagcacaaggtgtacgcctgcgaggtgacccaccagggactgtctagccccgtgaccaagagcttcaaccggggcgagtgctaa

SEQ ID NO: 755 - DNA, 660 bp, synthetic construct
  misc_feature 1..660: note = 15F10.2D6 light chain DNA sequence
  source 1..660: mol_type = other DNA
gatgttttgatgacccaaactccactctccctgcctgtcagtcttggagatcaagcctccatctcttgcagatctagtcagagcattgtacataataatggaaacacctatttagaatggtacctgcagaaaccaggccagtctccaaaactcctgatctacaaagtttccaaccgattttctggggtcccagacaggttcagtggcagtggatcagggacagatttcacactcaagatcagcagagtggaggctgaggatctgggagtttattactgctttcaaggttcacatgttccgctcacgttcggtggtgggaccaagttggagctgaaacggaccgtggccgcccccagcgtgttcatcttccctcccagcgacgagcagctgaagtctggcaccgccagcgtggtgtgcctgctgaacaacttctacccccgcgaggccaaggtgcagtggaaggtggacaacgccctgcagagcggcaacagccaggagagcgtgaccgagcaggactccaaggacagcacctacagcctgagcagcaccctgaccctgagcaaggccgactacgagaagcacaaggtgtacgcctgcgaggtgacccaccagggactgtctagccccgtgaccaagagcttcaaccggggcgagtgctaa

SEQ ID NO: 756 - DNA, 645 bp, synthetic construct
  misc_feature 1..645: note = 19B5.2E6 light chain DNA sequence
  source 1..645: mol_type = other DNA
gatatacaaatgactcaaactacctcttctctttccgcatctttgggtgatcgggtcactatatcctgctccgcctctcaaggcataaacaattacctgaattggtatcagcaaaaaccagacggaactgtaaaattgcttatctactacgcttcaagtctgcatagtggggttcccagcagattttccggttccgggtccggcactgattattctctcacaattagtaacctggaacctgaggacattgcaacttattactgtcaacaatacagtcaggtaccttacactttcggatcaggaacaaagttggaaatcaagaggaccgtggccgcccccagcgtgttcatcttccctcccagcgacgagcagctgaagtctggcaccgccagcgtggtgtgcctgctgaacaacttctacccccgcgaggccaaggtgcagtggaaggtggacaacgccctgcagagcggcaacagccaggagagcgtgaccgagcaggactccaaggacagcacctacagcctgagcagcaccctgaccctgagcaaggccgactacgagaagcacaaggtgtacgcctgcgaggtgacccaccagggactgtctagccccgtgaccaagagcttcaaccggggcgagtgctaa

SEQ ID NO: 757 - DNA, 645 bp, synthetic construct
  misc_feature 1..645: note = 20D11.2C6 light chain DNA sequence
  source 1..645: mol_type = other DNA
gacatccagatgaaccagtctccatccagtctgtctgcatccctcggagacacaattaccatcacttgccgtgccagtcagaacatttatatttggttaagttggtaccagcagaaaccaggaaatattcctaaactcttgatctataaggcttccaacttgcacacaggcgtcccatcaaggtttagtggcagtggatctggaacagatttcacattaaccatcagcactctgcagcctgaagacattgccacttacttctgtctccagggtcaaagttatcctctcacgttcggtgctgggaccaagctggagatgaaacggaccgtggccgcccccagcgtgttcatcttccctcccagcgacgagcagctgaagtctggcaccgccagcgtggtgtgcctgctgaacaacttctacccccgcgaggccaaggtgcagtggaaggtggacaacgccctgcagagcggcaacagccaggagagcgtgaccgagcaggactccaaggacagcacctacagcctgagcagcaccctgaccctgagcaaggccgactacgagaagcacaaggtgtacgcctgcgaggtgacccaccagggactgtctagccccgtgaccaagagcttcaaccggggcgagtgctaa

SEQ ID NO: 758 - DNA, 648 bp, synthetic construct
  misc_feature 1..648: note = 20H5.A3 light chain DNA sequence
  source 1..648: mol_type = other DNA
gatatccagatgacacagactacatcctccctgtctgcctctctgggagacagagtcaccatcaattgcagtgcaagtcaggacattagcaattatttaaactggtatcagcagaaaccagatggaactgttaaactcctgatctattacacatcaagtttactctcaggagtcccatcaaggttcagtggcagtgggtctgggacagattattctctcaccatcagcaacctggaacctgaagatattgccacttacttttgtcagcaatatagtaagcttccctatacgttcggatcggggacccacctggaaataaaacgtgctgatgttgcccctactgtgtccatcttccccccctcctccgagcagctgacatccggcggcgcctccgtggtgtgcttcctgaacaacttctaccccaaagacatcaacgtgaaatggaaaatcgacggctccgagaggcagaacggcgtgctgaactcctggacagaccaggactccaaagactccacatactccatgtcctccacactgacactgacaaaagacgagtacgagaggcacaactcctacacatgcgaggccacacacaaaacatccacatcccccatcgtgaaatccttcaacaggaacgagtgctaataa

SEQ ID NO: 759 - DNA, 645 bp, synthetic construct
  misc_feature 1..645: note = 23H9.2E4 light chain DNA sequence
  source 1..645: mol_type = other DNA
gatatccagatgacacagactacatcctccctgtctgcctctctgggagacagagtcaccatcagttgcagtgcaagtcagggcattaacaattatttaaactggtatcagcagaaaccagatggaactgttaaactcctgatctattacgcatcaagtttacactcaggagtcccatcaaggttcagtggcagtgggtctgggacagattattctctcaccatcagcaacctggaacctgaagatattgccacttactattgtcagcagtatagtcaggttccgtatacgttcggatcggggaccaagttggaaataaaacggaccgtggccgcccccagcgtgttcatcttccctcccagcgacgagcagctgaagtctggcaccgccagcgtggtgtgcctgctgaacaacttctacccccgcgaggccaaggtgcagtggaaggtggacaacgccctgcagagcggcaacagccaggagagcgtgaccgagcaggactccaaggacagcacctacagcctgagcagcaccctgaccctgagcaaggccgactacgagaagcacaaggtgtacgcctgcgaggtgacccaccagggactgtctagccccgtgaccaagagcttcaaccggggcgagtgctaa

SEQ ID NO: 760 - DNA, 660 bp, synthetic construct
  misc_feature 1..660: note = 2D10-VH0-VL0 light chain DNA sequence
  source 1..660: mol_type = other DNA
gacatagtaatgacacaggccgcatttagcaatccagtaaccttgggcacatccgcctccatatcttgcaggtcatccaaaagcttgctgcactctgacggtattacttacctgtactggtatttgcagcgacctgggcaatcccctcaactcctgatttaccgcatgagcaacctggcctcaggggtgcctgaccgcttttcaggatcagggagcggcactgacttcaccttgcgaatcagcagagtagaagcagaggatgttggagtttactactgtgcccagatgatcgaatttccacttacttttggggccgggaccattctggagcttaaacggaccgtggccgcccccagcgtgttcatcttccctcccagcgacgagcagctgaagtctggcaccgccagcgtggtgtgcctgctgaacaacttctacccccgcgaggccaaggtgcagtggaaggtggacaacgccctgcagagcggcaacagccaggagagcgtgaccgagcaggactccaaggacagcacctacagcctgagcagcaccctgaccctgagcaaggccgactacgagaagcacaaggtgtacgcctgcgaggtgacccaccagggactgtctagccccgtgaccaagagcttcaaccggggcgagtgctaa

SEQ ID NO: 761 - DNA, 660 bp, synthetic construct
  misc_feature 1..660: note = 3B11.2G2 light chain DNA sequence
  source 1..660: mol_type = other DNA
gatgttgtgatgacccagactccactcactttgtcggttgccattggacaaccagcttccatctcttgcaagtcgagtcagagcctcttatatactaatggaaaaacctatttgaattggttattacagaggccaggccagtctccaaaacgcctaatctatctggtgtctaaattggactctggagtccctgacaggttcagtggcagtggatcagggacagatttcacactgaaaatcagcagagtggaggctgaggatttgggagtttattactgcttgcagagtacacattttccgctcacgttcggtgctgggaccaagctggagctgaaacggaccgtggccgcccccagcgtgttcatcttccctcccagcgacgagcagctgaagtctggcaccgccagcgtggtgtgcctgctgaacaacttctacccccgcgaggccaaggtgcagtggaaggtggacaacgccctgcagagcggcaacagccaggagagcgtgaccgagcaggactccaaggacagcacctacagcctgagcagcaccctgaccctgagcaaggccgactacgagaagcacaaggtgtacgcctgcgaggtgacccaccagggactgtctagccccgtgaccaagagcttcaaccggggcgagtgctaa

SEQ ID NO: 762 - DNA, 660 bp, synthetic construct
  misc_feature 1..660: note = 7D8.2D8 light chain DNA sequence
  source 1..660: mol_type = other DNA
gatgttttgatgacccaaactccactctccctgcctgtcagtcttggagatcaagcctccatctcttgcagatctagtcagagcattgtacatagtaatggaaacacctatttagaatggtacctgcagaaaccaggccagtctccaaagctcctgatctacaaagtttccaaccgattttctggggtcccagacaggttcagtggcagtggatcagggacagatttcacactcaagatcagcagagtggaggctgaggatctgggagtttattactgctttcaaggttcacatgttccgctcacgttcggtgctgggaccaagctggagctgaaacggaccgtggccgcccccagcgtgttcatcttccctcccagcgacgagcagctgaagtctggcaccgccagcgtggtgtgcctgctgaacaacttctacccccgcgaggccaaggtgcagtggaaggtggacaacgccctgcagagcggcaacagccaggagagcgtgaccgagcaggactccaaggacagcacctacagcctgagcagcaccctgaccctgagcaaggccgactacgagaagcacaaggtgtacgcctgcgaggtgacccaccagggactgtctagccccgtgaccaagagcttcaaccggggcgagtgctaa

SEQ ID NO: 763 - DNA, 663 bp, synthetic construct
  misc_feature 1..663: note = mIMT001 light chain DNA sequence
  source 1..663: mol_type = other DNA
gatattgttattactcaggatgagcttagtaatcctgtcactagcggggaaagtgttagtatcagttgtcgttcatccaagtcactcctctacaaagacggcaagacttatctcaactggtttcttcaacgacccggtcaatctccacagctcctgatttacctgatgtcaactcacgcttctggtgttagcgaccgtttctccggaagtggctccgggacagacttcactcttgaaatctcacgtgtaaaagcagaggacgtaggtgtctattattgtcaacagcttgtggactaccccttgacctttggcgctggcacaaagctggaactgaagcgtgctgatgttgcccctactgtgtccatcttccccccctcctccgagcagctgacatccggcggcgcctccgtggtgtgcttcctgaacaacttctaccccaaagacatcaacgtgaaatggaaaatcgacggctccgagaggcagaacggcgtgctgaactcctggacagaccaggactccaaagactccacatactccatgtcctccacactgacactgacaaaagacgagtacgagaggcacaactcctacacatgcgaggccacacacaaaacatccacatcccccatcgtgaaatccttcaacaggaacgagtgctaataa

SEQ ID NO: 764 - DNA, 660 bp, synthetic construct
  misc_feature 1..660: note = 4A11.2B5 light chain DNA sequence
  source 1..660: mol_type = other DNA
gacattgtgatgactcaggcagccttttccaaccctgtaacacttggaactagtgcctccatctcatgccgttccagcaagagtcttttgcacagcgatgggataacctatctctattggtatctgcaacgacccggtcagtcaccccaacttcttatctatcgaatgtctaacttggcctccggcgtgcccgaccgcttttccgggagtgggagcggtacagatttcaccttgcgaatttcccgggttgaggcagaggacgtaggtgtctactattgtgctcagatgcttgagtttcctctcactttcggagccggcaccaaactggaactgaaacggaccgtggccgcccccagcgtgttcatcttccctcccagcgacgagcagctgaagtctggcaccgccagcgtggtgtgcctgctgaacaacttctacccccgcgaggccaaggtgcagtggaaggtggacaacgccctgcagagcggcaacagccaggagagcgtgaccgagcaggactccaaggacagcacctacagcctgagcagcaccctgaccctgagcaaggccgactacgagaagcacaaggtgtacgcctgcgaggtgacccaccagggactgtctagccccgtgaccaagagcttcaaccggggcgagtgctaa

SEQ ID NO: 765 - DNA, 660 bp, synthetic construct; identical to SEQ ID NO: 751
  misc_feature 1..660: note = 4A11.H1L1 light chain DNA sequence
  source 1..660: mol_type = other DNA

SEQ ID NO: 766 - DNA, 660 bp, synthetic construct
  misc_feature 1..660: note = 4A11.H4L2 light chain DNA sequence
  source 1..660: mol_type = other DNA
gatattgtaatgacccaaagccccctgtccttgcctgttaccccaggtgagcctgccagcatatcttgccgatccagtaaatctctgcttcatagcgatggcatcacctatttgtattggtatttgcagaagcccggccagagcccccagttgctgatctacagaatgtccaaccttgctagtggagtgcccgaccggtttagcggttcaggctcagggactgatttcactcttaaaatcagtagggtagaggccgaagacgttggtgtatattattgtgctcagatgttggagtttccactcacatttggacaaggtacaaagctggaaattaagcggaccgtggccgcccccagcgtgttcatcttccctcccagcgacgagcagctgaagtctggcaccgccagcgtggtgtgcctgctgaacaacttctacccccgcgaggccaaggtgcagtggaaggtggacaacgccctgcagagcggcaacagccaggagagcgtgaccgagcaggactccaaggacagcacctacagcctgagcagcaccctgaccctgagcaaggccgactacgagaagcacaaggtgtacgcctgcgaggtgacccaccagggactgtctagccccgtgaccaagagcttcaaccggggcgagtgctaa

SEQ ID NO: 767 - DNA, 660 bp, synthetic construct
  misc_feature 1..660: note = 4G2.2G6 light chain DNA sequence
  source 1..660: mol_type = other DNA
gatgtcgtaatgactcaaacccccctgacccttagtgttactataggccagcccgcaagcatctcctgcaaatcctcccagtctcttctttatactgatggcaaaacctacttgtcctggtttttgcagcgcccaggtcaaagtcctaaacgtcttatttacttggtctctaaactcgattccggcgtgcctgaccggttctccggtagcggtagcggtaccgatttcactttgaagattagccgagttgaggcagaagacctcggggtctactactgccttcagagtacacacttcccacttacatttggcgcaggaaccaagttggaggttaaacggaccgtggccgcccccagcgtgttcatcttccctcccagcgacgagcagctgaagtctggcaccgccagcgtggtgtgcctgctgaacaacttctacccccgcgaggccaaggtgcagtggaaggtggacaacgccctgcagagcggcaacagccaggagagcgtgaccgagcaggactccaaggacagcacctacagcctgagcagcaccctgaccctgagcaaggccgactacgagaagcacaaggtgtacgcctgcgaggtgacccaccagggactgtctagccccgtgaccaagagcttcaaccggggcgagtgctaa

SEQ ID NO: 768 - DNA, 645 bp, synthetic construct
  misc_feature 1..645: note = 6B3.2D3 light chain DNA sequence
  source 1..645: mol_type = other DNA
agtattgtgatgacccagactcccaaattcctgcttgtatcagcaggagacagggttaccataacctgcaaggccagtcagagtgtgagtaatgatgtagcttggtaccaacagaagccagggcagtctcctaaattgttgatatattatgcatccaatcgctacactggagtccctgatcgcttcactggcagtggatatgggacggatttcactttcaccatcagcactgtgcaggctgaagacctggcagtttatttctgtcagcaggattatacctctccgtacacgttcggaggggggaccaagctggaaataaaacggaccgtggccgcccccagcgtgttcatcttccctcccagcgacgagcagctgaagtctggcaccgccagcgtggtgtgcctgctgaacaacttctacccccgcgaggccaaggtgcagtggaaggtggacaacgccctgcagagcggcaacagccaggagagcgtgaccgagcaggactccaaggacagcacctacagcctgagcagcaccctgaccctgagcaaggccgactacgagaagcacaaggtgtacgcctgcgaggtgacccaccagggactgtctagccccgtgaccaagagcttcaaccggggcgagtgctaa

SEQ ID NO: 769 - DNA, 645 bp, synthetic construct
  misc_feature 1..645: note = 6H6.2D6 light chain DNA sequence
  source 1..645: mol_type = other DNA
gacatccagatgacccagaccacctcctccctgtccgcctccctgggcgacagggtgaccatctcctgctccgcctcccagggcatctccaactacctgaactggtaccagcagaagcccgacggcaccgtgaagctgctgatctactacacctcctccctgcactccggcgtgccctccaggttctccggctccggctccggcaccgactactccctgaccatctccaacctggagcccgaggacatcgccacctactactgccagcagtactccgagctgccctacaccttcggctccggcaccaagctggagatcaagaggaccgtggccgcccccagcgtgttcatcttccctcccagcgacgagcagctgaagtctggcaccgccagcgtggtgtgcctgctgaacaacttctacccccgcgaggccaaggtgcagtggaaggtggacaacgccctgcagagcggcaacagccaggagagcgtgaccgagcaggactccaaggacagcacctacagcctgagcagcaccctgaccctgagcaaggccgactacgagaagcacaaggtgtacgcctgcgaggtgacccaccagggactgtctagccccgtgaccaagagcttcaaccggggcgagtgctaa

SEQ ID NO: 770 - DNA, 645 bp, synthetic construct
  misc_feature 1..645: note = 9H2.2H10 light chain DNA sequence
  source 1..645: mol_type = other DNA
gacattgtgatgacccagtctcacaaattcatgtccacatcagtaggagacagggtcagcatcacctgcaaggccagtcaggatgtgagtactgctgtagcctggtatcaacaaaaaccagggcaatctcctaaactactgatttactgggcatccacccggcacactggagtccctgatcgcttcacaggcagtggatctgggacagattatactctcaccatcagcagtgtgcaggctgaagacctggcactttattactgtcagcaacattataccactccgctcacgttcggtgctgggaccaagctggagctgaaacggaccgtggccgcccccagcgtgttcatcttccctcccagcgacgagcagctgaagtctggcaccgccagcgtggtgtgcctgctgaacaacttctacccccgcgaggccaaggtgcagtggaaggtggacaacgccctgcagagcggcaacagccaggagagcgtgaccgagcaggactccaaggacagcacctacagcctgagcagcaccctgaccctgagcaaggccgactacgagaagcacaaggtgtacgcctgcgaggtgacccaccagggactgtctagccccgtgaccaagagcttcaaccggggcgagtgctaa

SEQ ID NO: 771 - DNA, 645 bp, synthetic construct
  misc_feature 1..645: note = 13G4.2F8 light chain DNA sequence
  source 1..645: mol_type = other DNA
gacattgtgatgacccagtctcaaaaattcatgtccacatcagtaggagagagggtcagcatcacctgcaaggccagtcagaatgtaggtactaatgtagcctggtatcagcagaaagcagggcagtctcttgaactgctgatctatggggcatccaaccggcacactggagtccctgatcgcttcacaggcagtggatctgggacagatttcactctcaccatcaccaatgtgcagtctgaagacatgacaaattatttctgtgagcaatatagcaactttcctctcacgttcggtgctgggaccaagctggagctgaaacggaccgtggccgcccccagcgtgttcatcttccctcccagcgacgagcagctgaagtctggcaccgccagcgtggtgtgcctgctgaacaacttctacccccgcgaggccaaggtgcagtggaaggtggacaacgccctgcagagcggcaacagccaggagagcgtgaccgagcaggactccaaggacagcacctacagcctgagcagcaccctgaccctgagcaaggccgactacgagaagcacaaggtgtacgcctgcgaggtgacccaccagggactgtctagccccgtgaccaagagcttcaaccggggcgagtgctaa

SEQ ID NO: 772 - DNA, 660 bp, synthetic construct
  misc_feature 1..660: note = 13H12.2F8 light chain DNA sequence
  source 1..660: mol_type = other DNA
gacgttgttatgacacaaacaccacttacactttctgtaactatcggtcagcctgcctcaatttcatgtaagtcttctcagtccctgtttcatagcgacgggaagacttacctgaattggcttctccaacgaccaggccaatcacccaagcgccttatttatttggtcagtaaattggacagtggagttcccgatagatttaccgggagcggttctgggaccgatttcaccccaaagatctccagggtagaagacgaagatctcggtgtgtactattgctggcaggggacacatttccctctgacattcggtgctggaaccaaacttgagatgaaacggaccgtggccgcccccagcgtgttcatcttccctcccagcgacgagcagctgaagtctggcaccgccagcgtggtgtgcctgctgaacaacttctacccccgcgaggccaaggtgcagtggaaggtggacaacgccctgcagagcggcaacagccaggagagcgtgaccgagcaggactccaaggacagcacctacagcctgagcagcaccctgaccctgagcaaggccgactacgagaagcacaaggtgtacgcctgcgaggtgacccaccagggactgtctagccccgtgaccaagagcttcaaccggggcgagtgctaa

SEQ ID NO: 773 - DNA, 645 bp, synthetic construct
  misc_feature 1..645: note = 15G7.2A7 light chain DNA sequence
  source 1..645: mol_type = other DNA
gacatccagatgaaccagtctccatccagtctgtctgcatccctcggagacacaatttccatcacttgccgtgccagtcagaacattaatatttggttaagctggtaccagcagaaaccaggaaatattcctcaactattgatctataaggcttccaacttgcacacaggcgtcccctcaaggtttagtggcagtggatctggaacagatttcacattaaccatcagcagtctgcagcctgaagacattgccacttactactgtctacagggtcaaagttatcctctcacgttcggtgctgggaccaagctggtgatgaaacggaccgtggccgcccccagcgtgttcatcttccctcccagcgacgagcagctgaagtctggcaccgccagcgtggtgtgcctgctgaacaacttctacccccgcgaggccaaggtgcagtggaaggtggacaacgccctgcagagcggcaacagccaggagagcgtgaccgagcaggactccaaggacagcacctacagcctgagcagcaccctgaccctgagcaaggccgactacgagaagcacaaggtgtacgcctgcgaggtgacccaccagggactgtctagccccgtgaccaagagcttcaaccggggcgagtgctaa

SEQ ID NO: 774 - DNA, 654 bp, synthetic construct
  misc_feature 1..654: note = 19D9.2E5 light chain DNA sequence
  source 1..654: mol_type = other DNA
gatgttgtgatgacccagactccactcactttgtcggttaccattggacaaccagcctccatctcttgtaagtcaagtcagagcctcttacatagtgatggaaagacatatttgaattggttgttacagaggccaggccagcctccaaagcgcctaatgtatctggtgtctacactggactctggagtccctgacaggttcactggcagtggatcagggacagatttcacactgaaaatcagcagagtggaggctgaggatttgggagtttattattgctggcaaggtacacattttcctctcacgttcggtgctgggaccaagccggagcggaccgtggccgcccccagcgtgttcatcttccctcccagcgacgagcagctgaagtctggcaccgccagcgtggtgtgcctgctgaacaacttctacccccgcgaggccaaggtgcagtggaaggtggacaacgccctgcagagcggcaacagccaggagagcgtgaccgagcaggactccaaggacagcacctacagcctgagcagcaccctgaccctgagcaaggccgactacgagaagcacaaggtgtacgcctgcgaggtgacccaccagggactgtctagccccgtgaccaagagcttcaaccggggcgagtgctaa

SEQ ID NO: 775 - DNA, 654 bp, synthetic construct
  misc_feature 1..654: note = 23B10.2B12 light chain DNA sequence
  source 1..654: mol_type = other DNA
gatattgtgatgacgcaggctgcattctccaatccagtcactcttggaacgtcagcttccatctcctgcaggtctagtaagagtctcctacatagtgatggcatcacttatttctattggtatctgcagaggccaggccagtctcctcagctcctgatatatcggatgtccaaccttgcctcaggagtcccagacaggttcagtggcagtgggtcaggaactgatttcacactgagaatcagcagagtggaggctgaggatgtgggtgtttattactgtgctcaaatgctagaattcccgctcacgttcggtgctgggaccaagctggagcggaccgtggccgcccccagcgtgttcatcttccctcccagcgacgagcagctgaagtctggcaccgccagcgtggtgtgcctgctgaacaacttctacccccgcgaggccaaggtgcagtggaaggtggacaacgccctgcagagcggcaacagccaggagagcgtgaccgagcaggactccaaggacagcacctacagcctgagcagcaccctgaccctgagcaaggccgactacgagaagcacaaggtgtacgcctgcgaggtgacccaccagggactgtctagccccgtgaccaagagcttcaaccggggcgagtgctaa

SEQ ID NO: 776 - DNA, 645 bp, synthetic construct
  misc_feature 1..645: note = 24D12.2H9 light chain DNA sequence
  source 1..645: mol_type = other DNA
gacattgtgatgacccagtctcacaaattcatgtccacatcagtaggagacagggtcagcatcacctgcaaggccagtcaggatgtgcgtactgctgtagcctggtatcaacagaaaccagggcaatctcctaaactactgatttactgggcatccacccggcacactggagtccctgatcgcttcacaggcagtggatctgggacagatttcactctcacccttagcaatgtgcagtctgaagacttggcagattatttctgtcagcaatatagtagttatccgtggacgttcggtggaggcaccaagctggaaatcaaacggaccgtggccgcccccagcgtgttcatcttccctcccagcgacgagcagctgaagtctggcaccgccagcgtggtgtgcctgctgaacaacttctacccccgcgaggccaaggtgcagtggaaggtggacaacgccctgcagagcggcaacagccaggagagcgtgaccgagcaggactccaaggacagcacctacagcctgagcagcaccctgaccctgagcaaggccgactacgagaagcacaaggtgtacgcctgcgaggtgacccaccagggactgtctagccccgtgaccaagagcttcaaccggggcgagtgctaa

SEQ ID NO: 777 - DNA, 660 bp, synthetic construct
  misc_feature 1..660: note = F846C.1B2 light chain DNA sequence
  source 1..660: mol_type = other DNA
aacatttggttgacacagtcgccatcatctctggctgtgtctgcaggagaaatggtcactatgacctgtaagtccagtcaaagtgttttatacagttcaaatcagaagaactacttggcctggtaccagcagaaaccagggcagtctcctaaactgctgatctactgggcatccactagggaatctggtgtccctgatcgcttcacaggcagtggatctgggacagacttttctcttaccatcagcagtgtacaagctgaagacctggcagtttattactgtcatcaatatctctcctcgctcacgttcggtgctgggaccaagctggagctgaaacggaccgtggccgcccccagcgtgttcatcttccctcccagcgacgagcagctgaagtctggcaccgccagcgtggtgtgcctgctgaacaacttctacccccgcgaggccaaggtgcagtggaaggtggacaacgccctgcagagcggcaacagccaggagagcgtgaccgagcaggactccaaggacagcacctacagcctgagcagcaccctgaccctgagcaaggccgactacgagaagcacaaggtgtacgcctgcgaggtgacccaccagggactgtctagccccgtgaccaagagcttcaaccggggcgagtgctaa

SEQ ID NO: 778 - DNA, 660 bp, synthetic construct
  misc_feature 1..660: note = F846C.1F5 light chain DNA sequence
  source 1..660: mol_type = other DNA
aacattatgatgacacagtcgccatcatctctggctgtgtctgcaggagaaaaggtcactatgagctgtaagtccagtcaaagtgttttatacagttcaaatcagaagaactacttggcctggtaccagcagaaaccagggcagtctcctaaactgctgatctactgggcatccactagggaatctggtgtccctgatcgcttcacaggcagtggatctgggacagattttactcttaccatcagcagtgtacaacctgaagacctggcagtttattactgtcatcaatacctctcctcgctcacgttcggtgctgggaccaagctggagctgaaacggaccgtggccgcccccagcgtgttcatcttccctcccagcgacgagcagctgaagtctggcaccgccagcgtggtgtgcctgctgaacaacttctacccccgcgaggccaaggtgcagtggaaggtggacaacgccctgcagagcggcaacagccaggagagcgtgaccgagcaggactccaaggacagcacctacagcctgagcagcaccctgaccctgagcaaggccgactacgagaagcacaaggtgtacgcctgcgaggtgacccaccagggactgtctagccccgtgaccaagagcttcaaccggggcgagtgctaa

SEQ ID NO: 779 - DNA, 660 bp, synthetic construct
  misc_feature 1..660: note = F846C.1H12 light chain DNA sequence
  source 1..660: mol_type = other DNA
aacattatgatgacacagtcgccatcatctctggctgtgtctgcaggacaaaaggtcactatgagctgtaagtccagtcaaagtgttttatacagttcaagtcagaagaactacttggcctggtaccagcagaaaccagggcagtctcctaaacttctgatctactgggcatccactagggaatctggtgtccctgatcgcttctcaggcagtggatctgggacagattttactcttaccatcagcagtgtacaacctgaagacctggcagtttattactgtcatcaatacctctcctcgctcacgttcggtgctgggaccaagctggagctgaaacggaccgtggccgcccccagcgtgttcatcttccctcccagcgacgagcagctgaagtctggcaccgccagcgtggtgtgcctgctgaacaacttctacccccgcgaggccaaggtgcagtggaaggtggacaacgccctgcagagcggcaacagccaggagagcgtgaccgagcaggactccaaggacagcacctacagcctgagcagcaccctgaccctgagcaaggccgactacgagaagcacaaggtgtacgcctgcgaggtgacccaccagggactgtctagccccgtgaccaagagcttcaaccggggcgagtgctaa

SEQ ID NO: 780 - DNA, 663 bp, synthetic construct
  misc_feature 1..663: note = F846C.1H5 light chain DNA sequence
  source 1..663: mol_type = other DNA
gatgttgtgatgacccaaactccactctccctgcctgtcagtcttggagatcaagcctccatctcttgcagatctagtcagagccttgtacacaatagtggaaacacctatttacattggtacctgcagaggccaggccagtctccaaacctcctgatctacaaagtttccaaccgattttctggggtcccagacaggttcagtggcagtggatcagggacagatttcacactcaagatcagcagagtggcggctgaggatctgggagtttatttctgctctcaaagtacacatgttcctccgacgttcggtggaggcaccaagctggaaatcaaacggaccgtggccgcccccagcgtgttcatcttccctcccagcgacgagcagctgaagtctggcaccgccagcgtggtgtgcctgctgaacaacttctacccccgcgaggccaaggtgcagtggaaggtggacaacgccctgcagagcggcaacagccaggagagcgtgaccgagcaggactccaaggacagcacctacagcctgagcagcaccctgaccctgagcaaggccgactacgagaagcacaaggtgtacgcctgcgaggtgacccaccagggactgtctagccccgtgaccaagagcttcaaccggggcgagtgctaagga

SEQ ID NO: 781 - DNA, 660 bp, synthetic construct; identical to SEQ ID NO: 778
  misc_feature 1..660: note = F846C.2H3 light chain DNA sequence
  source 1..660: mol_type = other DNA

SEQ ID NO: 782 - DNA, 651 bp, synthetic construct
  misc_feature 1..651: note = F846TC.14A2 light chain DNA sequence
  source 1..651: mol_type = other DNA
caggctgttgtgactcaggaatctgcactcaccacatcacctggtgaaacagtcacactcacttgtcgctcaagtactggggctgttacaactagtaactatgccaactgggtccaagaaaaaccagatcatttattcactggtctaataggtggtatcaataaccgagttccaggtgttcctgccagattctcaggctccctgattggagacaaggcagccctcaccatcacaggggcacagactgaggatgaggcaatatatttctgtgctctatggtatagcaaccattgggtgttcggtggaggaaccaaactgactgtcctacggaccgtggccgcccccagcgtgttcatcttccctcccagcgacgagcagctgaagtctggcaccgccagcgtggtgtgcctgctgaacaacttctacccccgcgaggccaaggtgcagtggaaggtggacaacgccctgcagagcggcaacagccaggagagcgtgaccgagcaggactccaaggacagcacctacagcctgagcagcaccctgaccctgagcaaggccgactacgagaagcacaaggtgtacgcctgcgaggtgacccaccagggactgtctagccccgtgaccaagagcttcaaccggggcgagtgctaa

SEQ ID NO: 783 - DNA, 660 bp, synthetic construct
  misc_feature 1..660: note = F846TC.14E4 light chain DNA sequence
  source 1..660: mol_type = other DNA
gatattgtgatgacgcaggctgcattctccaatccagtcactcttggaacatcagcttccatctcctgcaggtctagtaagagtctcctacatactaatggcatcacttttttgtattggtatctgcagaagccaggccagtctcctcagcccctgatttatcagatgtccaaccttgcctcaggagtcccagacaggttcagtagcagtgggtcaggaactgatttcacactgagaatcagcagagtggaggctgaggatgtgggtgtttattactgtgctcaaaatctagaacttccttggacgttcggtggaggcaccaagctggaaatcaatcggaccgtggccgcccccagcgtgttcatcttccctcccagcgacgagcagctgaagtctggcaccgccagcgtggtgtgcctgctgaacaacttctacccccgcgaggccaaggtgcagtggaaggtggacaacgccctgcagagcggcaacagccaggagagcgtgaccgagcaggactccaaggacagcacctacagcctgagcagcaccctgaccctgagcaaggccgactacgagaagcacaaggtgtacgcctgcgaggtgacccaccagggactgtctagccccgtgaccaagagcttcaaccggggcgagtgctaa

SEQ ID NO: 784 - DNA, 660 bp, synthetic construct
  misc_feature 1..660: note = F846TC.16B5 light chain DNA sequence
  source 1..660: mol_type = other DNA
aacattatgatgacacagtcgccatcatctctggctgtgtctgcaggagaaaaggtcactatgagctgtaagtccagtcaaagtgttttatacagttcaaatcagaagaactacttggcctggtaccagcagaaaccagggcagtctcctaaactactgatctactgggcatccactagggaatctggtgtccctgatcgcttcacaggcagtggatctgggacagattttactcttaccatcagcagtgtacaagctgaagacctggcagtttattactgtcatcaatacctctcctcgctcacgttcggtgctgggaccaagctggagctgaaacggaccgtggccgcccccagcgtgttcatcttccctcccagcgacgagcagctgaagtctggcaccgccagcgtggtgtgcctgctgaacaacttctacccccgcgaggccaaggtgcagtggaaggtggacaacgccctgcagagcggcaacagccaggagagcgtgaccgagcaggactccaaggacagcacctacagcctgagcagcaccctgaccctgagcaaggccgactacgagaagcacaaggtgtacgcctgcgaggtgacccaccagggactgtctagccccgtgaccaagagcttcaaccggggcgagtgctaa

SEQ ID NO: 785 - DNA, 663 bp, synthetic construct
  misc_feature 1..663: note = F846TC.7F10 light chain DNA sequence
  source 1..663: mol_type = other DNA
gacattgtgatgacacagtctccatcctccctggctatgtcagtaggacagaaggtcactatgagctgcaagtccagtcagagccttttaaatagtagcaatcaaaagaactatttggcctggtaccagcagaaaccaggacagtctcctaaacttctggtatactttgcatccactagggaatctggggtccctgatcgcttcataggcagtggatctgggacagatttcactcttaccatcagcagtgtgcaggctgaagacctggcagattacttctgtcagcaacattatagcactccgtacacgttcggagggggggccaagctggaaataaaacggaccgtggccgcccccagcgtgttcatcttccctcccagcgacgagcagctgaagtctggcaccgccagcgtggtgtgcctgctgaacaacttctacccccgcgaggccaaggtgcagtggaaggtggacaacgccctgcagagcggcaacagccaggagagcgtgaccgagcaggactccaaggacagcacctacagcctgagcagcaccctgaccctgagcaaggccgactacgagaagcacaaggtgtacgcctgcgaggtgacccaccagggactgtctagccccgtgaccaagagcttcaaccggggcgagtgctaa

SEQ ID NO: 786 - DNA, 645 bp, synthetic construct
  misc_feature 1..645: note = F847C.10B9 light chain DNA sequence
  source 1..645: mol_type = other DNA
gacatccggatgactcagtctccatccagtctgtctgcatcccttggagacacaattaccatcacttgccatgccagtcagaacattaatgtttggttaagctggtaccagcagaaaccaggaaatattcctaaactattgatctataaggcttccaacttgcacacaggcgtcccatcaaggtttagtggcagtggatctggaacaggtttcacattaaccatcagcagcctgcagcctgaagacattgccacttactactgtcaacagggtcaaagttatccgtacacgttcggaggggggaccaagctggagctgaaacggaccgtggccgcccccagcgtgttcatcttccctcccagcgacgagcagctgaagtctggcaccgccagcgtggtgtgcctgctgaacaacttctacccccgcgaggccaaggtgcagtggaaggtggacaacgccctgcagagcggcaacagccaggagagcgtgaccgagcaggactccaaggacagcacctacagcctgagcagcaccctgaccctgagcaaggccgactacgagaagcacaaggtgtacgcctgcgaggtgacccaccagggactgtctagccccgtgaccaagagcttcaaccggggcgagtgctaa

SEQ ID NO: 787 - DNA, 645 bp, synthetic construct
  misc_feature 1..645: note = F847C.11B1 light chain DNA sequence
  source 1..645: mol_type = other DNA
gaaattgtgttgacccagtctccagcatccctgtccgtgactacaggagaaaaagtcactatcagatgcataaccagcattgatattgatgatgatatgaactggtaccagcagaagccaggggaacctcctaagctccttatttcagaaggcaatactcttcgtcctggagtcccatcccgattctccagcagtggctatggcacagattttgtttttacaattgaaaacacgctctcagaagatgttgcagattactactgtttgcaaagtgataacaagcctctcacgttcggtgctgggaccaagctggagctgaaacggaccgtggccgcccccagcgtgttcatcttccctcccagcgacgagcagctgaagtctggcaccgccagcgtggtgtgcctgctgaacaacttctacccccgcgaggccaaggtgcagtggaaggtggacaacgccctgcagagcggcaacagccaggagagcgtgaccgagcaggactccaaggacagcacctacagcctgagcagcaccctgaccctgagcaaggccgactacgagaagcacaaggtgtacgcctgcgaggtgacccaccagggactgtctagccccgtgaccaagagcttcaaccggggcgagtgctaa

SEQ ID NO: 788 - DNA, 645 bp, synthetic construct
  misc_feature 1..645: note = F847C.12F12 light chain DNA sequence
  source 1..645: mol_type = other DNA
gacatccaggtgattcagtctccatccagtctgtctgcatcccttggagacacaattaccatcacttgccatgccagtcagaacattaatgtttggttaagctggtaccagcagaaaccaggaaatattcctaaactattgatctataaggcttccaacttgcacacaggcgtcccatcaaggtttagtggcagtggatctggaacaggtttcacattaaccatcagcagcctgcagcctgaagacattgccacttactactgtcaacagggtcaaagttatccgtacacgttcggaggggggaccaagctggagctgaaacggaccgtggccgcccccagcgtgttcatcttccctcccagcgacgagcagctgaagtctggcaccgccagcgtggtgtgcctgctgaacaacttctacccccgcgaggccaaggtgcagtggaaggtggacaacgccctgcagagcggcaacagccaggagagcgtgaccgagcaggactccaaggacagcacctacagcctgagcagcaccctgaccctgagcaaggccgactacgagaagcacaaggtgtacgcctgcgaggtgacccaccagggactgtctagccccgtgaccaagagcttcaaccggggcgagtgctaa

SEQ ID NO: 789 - DNA, 646 bp, synthetic construct
  misc_feature 1..646: note = F847C.26F5 light chain DNA sequence
  source 1..646: mol_type = other DNA
gaaattaagatgaaccagtctccatccagtctgtctgcatcccttggagacacaattaccatcacttgccatgccagtcagaacattaatgtttggttaagctggtaccagcagaaaccaggaaatattcctaaactattgatctataaggcttccaacttgcacacaggcgtcccatcaaggtttagtggcagtggatctggaacaggtttcacattaaccatcagcagcctacagcctgaagacattgccacttactactgtcaacagggtcaaagttatccgtacacgttcggaggggggaccaagctggagctgaaaaggaccgtggccgcccccagcgtgttcatcttccctcccagcgacgagcagctgaagtctggcaccgccagcgtggtgtgcctgctgaacaacttctacccccgcgaggccaaggtgcagtggaaggtggacaacgccctgcagagcggcaacagccaggagagcgtgaccgagcaggactccaaggacagcacctacagcctgagcagcaccctgaccctgagcaaggccgactacgagaagcacaaggtgtacgcctgcgaggtgacccaccagggactgtctagccccgtgaccaagagcttcaaccggggcgagtgctaag

SEQ ID NO: 790 - DNA, 651 bp, synthetic construct
  misc_feature 1..651: note = F847C.4B10 light chain DNA sequence
  source 1..651: mol_type = other DNA
caggctgttgtgactcaggaatctgcactcaccacatcacctggtgaaacagtcacactcacttgtcgctcaagtactggggctgttacaactagtaactatgccaactgggtccaagaaaaaccagatcatttattcactggtctaataggtggtaccaacaaccgagctccaggtgttcctgccagattctcaggctccctgattggagacaaggctgccctcaccatcacaggggcacagactgaggatgaggcaatatatttctgtgctctatggtacagcaaccatttagtgttcggtggaggaaccaaactgactgtcctaaggaccgtggccgcccccagcgtgttcatcttccctcccagcgacgagcagctgaagtctggcaccgccagcgtggtgtgcctgctgaacaacttctacccccgcgaggccaaggtgcagtggaaggtggacaacgccctgcagagcggcaacagccaggagagcgtgaccgagcaggactccaaggacagcacctacagcctgagcagcaccctgaccctgagcaaggccgactacgagaagcacaaggtgtacgcctgcgaggtgacccaccagggactgtctagccccgtgaccaagagcttcaaccggggcgagtgctaa

SEQ ID NO: 791 - DNA, 660 bp, synthetic construct
  misc_feature 1..660: note = F849C.8D10 light chain DNA sequence
  source 1..660: mol_type = other DNA
gatgttttgatgacccaaactccactctccctgcctgtcagtcttggagatcaagcctccatctcttgcagatctagtcaggacattgtgcatagtagtggaaacacctatttagaatggtacctgcagaaaccaggccagtctctaaagctcctgatttacaaagtttccaaccgattttctggggtcccagacaggttcagtgccagtggatcagggacagatttcacactcaagatcagcagagtggaggctgaggatctgggagtttattactgctttcaaggttcacatgttcctcccacgttcggctcggggacaaagttggaaataaaacggaccgtggccgcccccagcgtgttcatcttccctcccagcgacgagcagctgaagtctggcaccgccagcgtggtgtgcctgctgaacaacttctacccccgcgaggccaaggtgcagtggaaggtggacaacgccctgcagagcggcaacagccaggagagcgtgaccgagcaggactccaaggacagcacctacagcctgagcagcaccctgaccctgagcaaggccgactacgagaagcacaaggtgtacgcctgcgaggtgacccaccagggactgtctagccccgtgaccaagagcttcaaccggggcgagtgctaa

SEQ ID NO: 792 - DNA, 660 bp, synthetic construct
  misc_feature 1..660: note = F849C.8H3 light chain DNA sequence
  source 1..660: mol_type = other DNA
gatattgggatgaggcaggctgcattctccaatccagtcactcttggaacatcagcttccatctcctgcaggtctagtaagagtctcctatatagtaatggcatcacttatttgtattggtttctccagaagccaggccagtctcctcagctcctgatttatcagatgtccaaccttgcctcaggagtcccagacaggttcagtagcagtgggtcaggaactgatttcacactgagaatcagcagagtggaggctgacgatgtgggtgtttattactgtgctcaaaatctagaacttccgtggacgttcggtggaggcaccaagctggaaatcaaacggaccgtggccgcccccagcgtgttcatcttccctcccagcgacgagcagctgaagtctggcaccgccagcgtggtgtgcctgctgaacaacttctacccccgcgaggccaaggtgcagtggaaggtggacaacgccctgcagagcggcaacagccaggagagcgtgaccgagcaggactccaaggacagcacctacagcctgagcagcaccctgaccctgagcaaggccgactacgagaagcacaaggtgtacgcctgcgaggtgacccaccagggactgtctagccccgtgaccaagagcttcaaccggggcgagtgctaa

SEQ ID NO: 793 - DNA, 657 bp, synthetic construct
  misc_feature 1..657: note = 846.2B11 light chain DNA sequence
  source 1..657: mol_type = other DNA
gacattgtgctgacacagtctcctgcttccttaggtgtttctctggggcagagggccaccatctcatgcagggccagcaaaagtgtcagtacatctggctatagttatatgcactggtaccaacagaaaccaggacagccacccaaactcctcatctatcttgcatccatcctagaatctggggtccctgccaggttcagtggcagtgggtctgggacagacttcaccctcaacatccatcctgtggaggaggaggatgctgcaatctattactgtcagcacagtagggagcttcctctcacgttcggtgctgggaccaagctggagctgaaacggaccgtggccgcccccagcgtgttcatcttccctcccagcgacgagcagctgaagtctggcaccgccagcgtggtgtgcctgctgaacaacttctacccccgcgaggccaaggtgcagtggaaggtggacaacgccctgcagagcggcaacagccaggagagcgtgaccgagcaggactccaaggacagcacctacagcctgagcagcaccctgaccctgagcaaggccgactacgagaagcacaaggtgtacgcctgcgaggtgacccaccagggactgtctagccccgtgaccaagagcttcaaccggggcgagtgctaa

SEQ ID NO: 794 - DNA, 657 bp, synthetic construct
  misc_feature 1..657: note = 846.4D5 light chain DNA sequence
  source 1..657: mol_type = other DNA
aacattgtgctgacccaatctccagcttctttggctgtgtctctagggcagagggccaccatatcctgcagagccagtgaaagtgttgatagttatggcaatagttttatgcactggtaccagcagaaaccaggacagccacccaaactcctcatctatcttgcatccaacctagaatctggggtccctgccaggttcagtggcagtgggtctaggacagacttcaccctcaccattgatcctgtggaggctgatgatgctgcaacctattactgtcagcaaaataatgaggatccgtggacgttcggtggaggcaccaagctggaaatcaaacggaccgtggccgcccccagcgtgttcatcttccctcccagcgacgagcagctgaagtctggcaccgccagcgtggtgtgcctgctgaacaacttctacccccgcgaggccaaggtgcagtggaaggtggacaacgccctgcagagcggcaacagccaggagagcgtgaccgagcaggactccaaggacagcacctacagcctgagcagcaccctgaccctgagcaaggccgactacgagaagcacaaggtgtacgcctgcgaggtgacccaccagggactgtctagccccgtgaccaagagcttcaaccggggcgagtgctaa

SEQ ID NO: 795 - DNA, 660 bp, synthetic construct
  misc_feature 1..660: note = 846T.1H2 light chain DNA sequence
  source 1..660: mol_type = other DNA
gatgttgtgatgacccagactccactcactttgtcggttaccattggacaaccagcctctatctcttgcaagtcaagtcagagtctcttatatagtaatggaaaaacctatttgaattggttattacagaggccaggccagtctccaaagcgcctaatctatctggtgtctaaactggactctggagtccctgacaggttcactggcagtggatcaggaacagattttacactgaaaatcagcagagtggaggctgaggatttgggagtttattactgcgtgcaaggtacacattttcctcagacgttcggtggaggcaccaagctggaaataaaaaggaccgtggccgcccccagcgtgttcatcttccctcccagcgacgagcagctgaagtctggcaccgccagcgtggtgtgcctgctgaacaacttctacccccgcgaggccaaggtgcagtggaaggtggacaacgccctgcagagcggcaacagccaggagagcgtgaccgagcaggactccaaggacagcacctacagcctgagcagcaccctgaccctgagcaaggccgactacgagaagcacaaggtgtacgcctgcgaggtgacccaccagggactgtctagccccgtgaccaagagcttcaaccggggcgagtgctaa

SEQ ID NO: 796 - DNA, 651 bp, synthetic construct; identical to SEQ ID NO: 790
  misc_feature 1..651: note = 847.14H4 light chain DNA sequence
  source 1..651: mol_type = other DNA

SEQ ID NO: 797 - DNA, 360 bp, synthetic construct
  misc_feature 1..360: note = 2D10.2B2 VH DNA sequence
  source 1..360: mol_type = other DNA
caggtccagctgcagcagtctggacctgagctggtgaagcctggggcttcagtgaagatatcctgcaaggcttctggctacaccttcactgactactatataaactgggtgaagcagaggcctggacagggacttgagtggattggatggatttatcctggaagcaatgataccaagtacaatgagaagttcaagggcaaggccacattgactgtagacacatcctccagcacggcctacatgcagctcggcagcctgacctctgaggactctgcggtctatttctgtgcgaattacttcggttgtagcgggtggttcttcgatgtctggggcacagggaccacagtcaccgtctcctca

SEQ ID NO: 798 - DNA, 336 bp, synthetic construct
  misc_feature 1..336: note = 2D10.2B2 VL DNA sequence
  source 1..336: mol_type = other DNA
gatattgtgatgacgcaggctgcattctccaatccagtcactcttggaacgtcagcttccatctcctgcaggtctagtaagagtctcctacatagtgatggcatcacttatttgtattggtatctgcagaggccaggccagtctcctcagctcctgatatatcggatgtccaaccttgcctcaggagtcccagacaggttcagtggcagtgggtcaggaactgatttcacactgagaatcagcagagtggaggctgaggatgtgggtgtttattactgtgctcaaatgatagaattcccgctcacgttcggtgctgggaccatcctggagctgaaa

SEQ ID NO: 799 - DNA, 1356 bp, synthetic construct
  misc_feature 1..1356: note = 2D10.2B2 heavy chain DNA sequence
  source 1..1356: mol_type = other DNA
caggtccagctgcagcagtctggacctgagctggtgaagcctggggcttcagtgaagatatcctgcaaggcttctggctacaccttcactgactactatataaactgggtgaagcagaggcctggacagggacttgagtggattggatggatttatcctggaagcaatgataccaagtacaatgagaagttcaagggcaaggccacattgactgtagacacatcctccagcacggcctacatgcagctcggcagcctgacctctgaggactctgcggtctatttctgtgcgaattacttcggttgtagcgggtggttcttcgatgtctggggcacagggaccacagtcaccgtctcctcagctaagactactcctcccagtgtctaccccctggcccccgtgtgcggcgacacaacaggctcctccgtgacactgggctgcctggtgaaaggctacttccccgagcccgtgacactgacatggaactccggctccctgtcctccggcgtgcacacattccccgccgtgctgcagtccgacctgtacacactgtcctcctccgtgacagtgacatcctccacatggccctcccagtccatcacatgcaacgtggcccaccccgcctcctccacaaaagtggacaaaaaaatcgagcccaggggccccacaatcaaaccctgccccccctgcaaatgccccgcccccaacgccgccggcggcccctccgtgttcatcttcccccccaaaatcaaagacgtgctgatgatctccctgtcccccatcgtgacatgcgtggtggtggacgtgtccgaggacgaccccgacgtgcagatctcctggttcgtgaacaacgtggaggtgcacacagcccagacacagacacacagggaggactacaactccacactgagggtggtgtccgccctgcccatccagcaccaggactggatgtccggcaaagagttcaaatgcaaagtgaacaacaaagacctgggcgcccccatcgagaggacaatctccaaacccaaaggctccgtgagggccccccaggtgtacgtgctgcccccccccgaggaggagatgacaaaaaaacaggtgacactgacatgcatggtgacagacttcatgcccgaggacatctacgtggagtggacaaacaacggcaaaacagagctgaactacaaaaacacagagcccgtgctggactccgacggctcctacttcatgtactccaaactgagggtggagaaaaaaaactgggtggagaggaactcctactcctgctccgtggtgcacgagggcctgcacaaccaccacacaacaaaatccttctccaggacacccggcaaatagtaa

SEQ ID NO: 800 - DNA, 663 bp, synthetic construct
  misc_feature 1..663: note = 2D10.2B2 light chain DNA sequence
  source 1..663: mol_type = other DNA
gatattgtgatgacgcaggctgcattctccaatccagtcactcttggaacgtcagcttccatctcctgcaggtctagtaagagtctcctacatagtgatggcatcacttatttgtattggtatctgcagaggccaggccagtctcctcagctcctgatatatcggatgtccaaccttgcctcaggagtcccagacaggttcagtggcagtgggtcaggaactgatttcacactgagaatcagcagagtggaggctgaggatgtgggtgtttattactgtgctcaaatgatagaattcccgctcacgttcggtgctgggaccatcctggagctgaaacgtgctgatgttgcccctactgtgtccatcttccccccctcctccgagcagctgacatccggcggcgcctccgtggtgtgcttcctgaacaacttctaccccaaagacatcaacgtgaaatggaaaatcgacggctccgagaggcagaacggcgtgctgaactcctggacagaccaggactccaaagactccacatactccatgtcctccacactgacactgacaaaagacgagtacgagaggcacaactcctacacatgcgaggccacacacaaaacatccacatcccccatcgtgaaatccttcaacaggaacgagtgctaataa

SEQ ID NO: 801 - protein, 8 aa, synthetic construct
  REGION 1..8: note = VH_CDR2_42
IYPGSQDT

SEQ ID NO: 802 - protein, 13 aa, synthetic construct
  REGION 1..13: note = VH_CDR3_59
ANYFGSSGWFFDV

SEQ ID NO: 803 - protein, 120 aa, synthetic construct
  REGION 1..120: note = VH-79
QFQLQQSGPELVKPGASVKISCKASGYTFTDYYINWVKQRPGQGLEWIGWIYPGSNDTKYNEKFKGKATLTVDTSSSTAYMQLGSLTSEDSAVYFCANYFGCSGWFFDVWGTGTTVTVSS

SEQ ID NO: 804 - protein, 446 aa, synthetic construct
  REGION 1..446: note = 2D10-VH0-VL0 heavy chain peptide sequence
QFQLQQSGPELVKPGASVKISCKASGYTFTDYYINWVKQRPGQGLEWIGWIYPGSNDTKYNEKFKGKATLTVDTSSSTAYMQLGSLTSEDSAVYFCANYFGCSGWFFDVWGTGTTVTVSSASTKGPSVFPLAPCSRSTSESTAALGCLVKDYFPEPVTVSWNSGALTSGVHTFPAVLQSSGLYSLSSVVTVPSSSLGTKTYTCNVDHKPSNTKVDKRVESKYGPPCPPCPAPEFLGGPSVFLFPPKPKDTLMISRTPEVTCVVVDVSQEDPEVQFNWYVDGVEVHNAKTKPREEQFNSTYRVVSVLTVLHQDWLNGKEYKCKVSNKGLPSSIEKTISKAKGQPREPQVYTLPPSQEEMTKNQVSLTCLVKGFYPSDIAVEWESNGQPENNYKTTPPVLDSDGSFFLYSRLTVDKSRWQEGNVFSCSVMHEALHNHYTQKSLSLSLG

SEQ ID NO: 805 - protein, 219 aa, synthetic construct
  REGION 1..219: note = 2D10-VH0-VL0 light chain peptide sequence
DIVMTQAAFSNPVTLGTSASISCRSSKSLLHSDGITYLYWYLQRPGQSPQLLIYRMSNLASGVPDRFSGSGSGTDFTLRISRVEAEDVGVYYCAQMIEFPLTFGAGTILELKRTVAAPSVFIFPPSDEQLKSGTASVVCLLNNFYPREAKVQWKVDNALQSGNSQESVTEQDSKDSTYSLSSTLTLSKADYEKHKVYACEVTHQGLSSPVTKSFNRGEC

SEQ ID NO: 806 - protein, 120 aa, synthetic construct
  REGION 1..120: note = VH-80 Peptide Sequence
QVQLVQSGAEVKKPGASVKVSCKASGYTFTDYYINWVRQAPGQRLEWMGWIYPGSQDTKYNEKFQGRVTLTVDTSASTAYMELSSLRSEDTAVYFCANYFGSSGWFFDVWGQGTMVTVSS

SEQ ID NO: 807 - protein, 120 aa, synthetic construct; identical to SEQ ID NO: 806
  REGION 1..120: note = VH-81 Peptide Sequence

SEQ ID NO: 808 - protein, 120 aa, synthetic construct; identical to SEQ ID NO: 806
  REGION 1..120: note = VH-82 Peptide Sequence

SEQ ID NO: 809 - protein, 120 aa, synthetic construct; identical to SEQ ID NO: 806
  REGION 1..120: note = VH-83 Peptide Sequence

SEQ ID NO: 810 - protein, 120 aa, synthetic construct
  REGION 1..120: note = VH-84 Peptide Sequence
QVQLVQSGAEVKKPGASVKVSCKASGYTFTDYYINWVRQAPGQRLEWMGWIYPGSQDTKYSQKFQGRVTITVDTSASTAYMELSSLRSEDTAVYYCANYFGSSGWFFDVWGQGTMVTVSS

SEQ ID NO: 811 - protein, 120 aa, synthetic construct; identical to SEQ ID NO: 810
  REGION 1..120: note = VH-85 Peptide Sequence

SEQ ID NO: 812 - protein, 120 aa, synthetic construct; identical to SEQ ID NO: 810
  REGION 1..120: note = VH-86 Peptide Sequence

SEQ ID NO: 813 - protein, 120 aa, synthetic construct; identical to SEQ ID NO: 810
  REGION 1..120: note = VH-87 Peptide Sequence

SEQ ID NO: 814 - protein, 116 aa, synthetic construct
  REGION 1..116: note = VH-88 Peptide Sequence
QIQLVQSGSELKKPGASVKVSCKASGYAFTTYGMSWVRQAPGQGLEWMGWVNTYSGVPTYADDFTGRFVFSLETSVSTAYLQISSLKAEDTAVYFCARGPYAMDYWGQGTLVTVSS

SEQ ID NO: 815 - protein, 116 aa, synthetic construct; identical to SEQ ID NO: 814
  REGION 1..116: note = VH-89 Peptide Sequence

SEQ ID NO: 816 - protein, 116 aa, synthetic construct
  REGION 1..116: note = VH-90 Peptide Sequence
QIQLVQSGSELKKPGASVKVSCKASGYAFTTYGMSWVRQAPGQGLEWMGWVNTYSGVPTSADDFTGRFVFSLETSVSTAYLQISSLKAEDTAVYFCARGPYAMDYWGQGTLVTVSS

SEQ ID NO: 817 - protein, 116 aa, synthetic construct
  REGION 1..116: note = VH-91 Peptide Sequence
QVQLVQSGFELKKPGASVKISCKASGYAFTTYGMSWVRQAPGQGLEWMGWVNTYSGVPTYAQAFTGRFVFSLDTSVSTAYLQISSLKAEDTAVYYCARGPYAMDYWGQGTLVTVSS

SEQ ID NO: 818 - protein, 116 aa, synthetic construct; identical to SEQ ID NO: 817
  REGION 1..116: note = VH-92 Peptide Sequence

SEQ ID NO: 819 - protein, 116 aa, synthetic construct
  REGION 1..116: note = VH-93 Peptide Sequence
QVQLVQSGFELKKPGASVKISCKASGYAFTTYGMSWVRQAPGQGLEWMGWVNTYSGVPTSAQAFTGRFVFSLDTSVSTAYLQISSLKAEDTAVYYCARGPYAMDYWGQGTLVTVSS

SEQ ID NO: 820 - protein, 116 aa, synthetic construct; identical to SEQ ID NO: 819
  REGION 1..116: note = VH-94 Peptide Sequence

SEQ ID NO: 821 - protein, 112 aa, synthetic construct
  REGION 1..112: note = VL-78 Peptide Sequence
DIVMTQSPLSLPVTPGEPASISCRSSKSLLHSDGITYLYWYLQKPGQSPQLLIYRMSNRASGVPDRFSGSGSGTDFTLKISRVEAEDVGVYYCAQMIEFPLTFGQGTKLEIK

SEQ ID NO: 822 - protein, 112 aa, synthetic construct
  REGION 1..112: note = VL-79 Peptide Sequence
DIVMTQSPLSLPVTPGEPASISCRSSKSLLHSDGITYLYWYLQKPGQSPQLLIYRMSNLASGVPDRFSGSGSGTDFTLKISRVEAEDVGVYYCAQMIEFPLTFGQGTKLEIK

SEQ ID NO: 823 - protein, 112 aa, synthetic construct
  REGION 1..112: note = VL-80 Peptide Sequence
DVVMTQSPLSLPVTLGQPASISCRSSKSLLHSDGITYLYWYQQRPGQSPRLLIYRMSNRDSGVPDRFSGSGSGTDFTLKISRVEAEDVGVYYCAQMIEFPLTFGQGTKLEIK

SEQ ID NO: 824 - protein, 112 aa, synthetic construct
  REGION 1..112: note = VL-81 Peptide Sequence
DIVMTQSPLSLPVTLGQPASISCRSSKSLLHSDGITYLYWYQQRPGQSPQLLIYRMSNLDSGVPDRFSGSGSGTDFTLKISRVEAEDVGVYYCAQMIEFPLTFGQGTKLEIK

SEQ ID NO: 825 - protein, 112 aa, synthetic construct; identical to SEQ ID NO: 821
  REGION 1..112: note = VL-82 Peptide Sequence

SEQ ID NO: 826 - protein, 112 aa, synthetic construct; identical to SEQ ID NO: 822
  REGION 1..112: note = VL-83 Peptide Sequence

SEQ ID NO: 827 - protein, 112 aa, synthetic construct; identical to SEQ ID NO: 823
  REGION 1..112: note = VL-84 Peptide Sequence

SEQ ID NO: 828 - protein, 112 aa, synthetic construct; identical to SEQ ID NO: 824
  REGION 1..112: note = VL-85 Peptide Sequence

SEQ ID NO: 829 - protein, 107 aa, synthetic construct
  REGION 1..107: note = VL-86 Peptide Sequence
DIQMTQSPSSLSASVGDRVTITCQASQDISNYLNWYQQKPGKAPKLLIYYTSSLLTGVPSRFSGSGSGTDYTFTISSLQPEDIATYYCQQYSKLPYTFGQGTKLEIK

SEQ ID NO: 830 - protein, 107 aa, synthetic construct
  REGION 1..107: note = VL-87 Peptide Sequence
DIQMTQSPSSLSASVGDRVTITCRASQDISNYLNWYQQKPGKAPKLLIYYTSSLLSGVPSRFSGSGSGTDYTLTISSLQPEDFATYYCQQYSKLPYTFGQGTKLEIK

SEQ ID NO: 831 - protein, 107 aa, synthetic construct; identical to SEQ ID NO: 829
  REGION 1..107: note = VL-88 Peptide Sequence

SEQ ID NO: 832 - protein, 107 aa, synthetic construct; identical to SEQ ID NO: 829
  REGION 1..107: note = VL-89 Peptide Sequence

SEQ ID NO: 833 - protein, 107 aa, synthetic construct; identical to SEQ ID NO: 830
  REGION 1..107: note = VL-90 Peptide Sequence

SEQ ID NO: 834 - protein, 107 aa, synthetic construct; identical to SEQ ID NO: 829
  REGION 1..107: note = VL-91 Peptide Sequence

SEQ ID NO: 835 - protein, 107 aa, synthetic construct; identical to SEQ ID NO: 830
  REGION 1..107: note = VL-92 Peptide Sequence

SEQ ID NO: 836 - protein, 446 aa, synthetic construct
  REGION 1..446: note = 2D10-hVH4-HVL1 heavy chain peptide sequence
QVQLVQSGAEVKKPGASVKVSCKASGYTFTDYYINWVRQAPGQRLEWMGWIYPGSQDTKYNEKFQGRVTLTVDTSASTAYMELSSLRSEDTAVYFCANYFGSSGWFFDVWGQGTMVTVSSASTKGPSVFPLAPCSRSTSESTAALGCLVKDYFPEPVTVSWNSGALTSGVHTFPAVLQSSGLYSLSSVVTVPSSSLGTKTYTCNVDHKPSNTKVDKRVESKYGPPCPPCPAPEFLGGPSVFLFPPKPKDTLMISRTPEVTCVVVDVSQEDPEVQFNWYVDGVEVHNAKTKPREEQFNSTYRVVSVLTVLHQDWLNGKEYKCKVSNKGLPSSIEKTISKAKGQPREPQVYTLPPSQEEMTKNQVSLTCLVKGFYPSDIAVEWESNGQPENNYKTTPPVLDSDGSFFLYSRLTVDKSRWQEGNVFSCSVMHEALHNHYTQKSLSLSLG

SEQ ID NO: 837 - protein, 446 aa, synthetic construct; identical to SEQ ID NO: 836
  REGION 1..446: note = 2D10-hVH4-HVL2 heavy chain peptide sequence

SEQ ID NO: 838 - protein, 446 aa, synthetic construct; identical to SEQ ID NO: 836
  REGION 1..446: note = 2D10-hVH4-HVL3 heavy chain peptide sequence

SEQ ID NO: 839 - protein, 446 aa, synthetic construct; identical to SEQ ID NO: 836
  REGION 1..446: note = 2D10-hVH4-HVL4 heavy chain peptide sequence

SEQ ID NO: 840 - protein, 446 aa, synthetic construct
  REGION 1..446: note = 2D10-hVH3-HVL1 heavy chain peptide sequence
QVQLVQSGAEVKKPGASVKVSCKASGYTFTDYYINWVRQAPGQRLEWMGWIYPGSQDTKYSQKFQGRVTITVDTSASTAYMELSSLRSEDTAVYYCANYFGSSGWFFDVWGQGTMVTVSSASTKGPSVFPLAPCSRSTSESTAALGCLVKDYFPEPVTVSWNSGALTSGVHTFPAVLQSSGLYSLSSVVTVPSSSLGTKTYTCNVDHKPSNTKVDKRVESKYGPPCPPCPAPEFLGGPSVFLFPPKPKDTLMISRTPEVTCVVVDVSQEDPEVQFNWYVDGVEVHNAKTKPREEQFNSTYRVVSVLTVLHQDWLNGKEYKCKVSNKGLPSSIEKTISKAKGQPREPQVYTLPPSQEEMTKNQVSLTCLVKGFYPSDIAVEWESNGQPENNYKTTPPVLDSDGSFFLYSRLTVDKSRWQEGNVFSCSVMHEALHNHYTQKSLSLSLG

SEQ ID NO: 841 - protein, 446 aa, synthetic construct; identical to SEQ ID NO: 840
  REGION 1..446: note = 2D10-hVH3-HVL2 heavy chain peptide sequence

SEQ ID NO: 842 - protein, 446 aa, synthetic construct; identical to SEQ ID NO: 840
  REGION 1..446: note = 2D10-hVH3-HVL3 heavy chain peptide sequence

SEQ ID NO: 843 - protein, 446 aa, synthetic construct; identical to SEQ ID NO: 840
  REGION 1..446: note = 2D10-hVH3-HVL4 heavy chain peptide sequence

SEQ ID NO: 844 - protein, 442 aa, synthetic construct
  REGION 1..442: note = 20H5.A3-VH3VL1 heavy chain peptide sequence
QIQLVQSGSELKKPGASVKVSCKASGYAFTTYGMSWVRQAPGQGLEWMGWVNTYSGVPTYADDFTGRFVFSLETSVSTAYLQISSLKAEDTAVYFCARGPYAMDYWGQGTLVTVSSASTKGPSVFPLAPCSRSTSESTAALGCLVKDYFPEPVTVSWNSGALTSGVHTFPAVLQSSGLYSLSSVVTVPSSSLGTKTYTCNVDHKPSNTKVDKRVESKYGPPCPPCPAPEFLGGPSVFLFPPKPKDTLMISRTPEVTCVVVDVSQEDPEVQFNWYVDGVEVHNAKTKPREEQFNSTYRVVSVLTVLHQDWLNGKEYKCKVSNKGLPSSIEKTISKAKGQPREPQVYTLPPSQEEMTKNQVSLTCLVKGFYPSDIAVEWESNGQPENNYKTTPPVLDSDGSFFLYSRLTVDKSRWQEGNVFSCSVMHEALHNHYTQKSLSLSLG

SEQ ID NO: 845 - protein, 442 aa, synthetic construct; identical to SEQ ID NO: 844
  REGION 1..442: note = 20H5.A3-VH3VL3 heavy chain peptide sequence

SEQ ID NO: 846 - protein, 442 aa, synthetic construct
  REGION 1..442: note = 20H5.A3-VH4VL1 heavy chain peptide sequence
QIQLVQSGSELKKPGASVKVSCKASGYAFTTYGMSWVRQAPGQGLEWMGWVNTYSGVPTSADDFTGRFVFSLETSVSTAYLQISSLKAEDTAVYFCARGPYAMDYWGQGTLVTVSSASTKGPSVFPLAPCSRSTSESTAALGCLVKDYFPEPVTVSWNSGALTSGVHTFPAVLQSSGLYSLSSVVTVPSSSLGTKTYTCNVDHKPSNTKVDKRVESKYGPPCPPCPAPEFLGGPSVFLFPPKPKDTLMISRTPEVTCVVVDVSQEDPEVQFNWYVDGVEVHNAKTKPREEQFNSTYRVVSVLTVLHQDWLNGKEYKCKVSNKGLPSSIEKTISKAKGQPREPQVYTLPPSQEEMTKNQVSLTCLVKGFYPSDIAVEWESNGQPENNYKTTPPVLDSDGSFFLYSRLTVDKSRWQEGNVFSCSVMHEALHNHYTQKSLSLSLG

SEQ ID NO: 847 - protein, 442 aa, synthetic construct
  REGION 1..442: note = 20H5.A3-VH5VL1 heavy chain peptide sequence
QVQLVQSGFELKKPGASVKISCKASGYAFTTYGMSWVRQAPGQGLEWMGWVNTYSGVPTYAQAFTGRFVFSLDTSVSTAYLQISSLKAEDTAVYYCARGPYAMDYWGQGTLVTVSSASTKGPSVFPLAPCSRSTSESTAALGCLVKDYFPEPVTVSWNSGALTSGVHTFPAVLQSSGLYSLSSVVTVPSSSLGTKTYTCNVDHKPSNTKVDKRVESKYGPPCPPCPAPEFLGGPSVFLFPPKPKDTLMISRTPEVTCVVVDVSQEDPEVQFNWYVDGVEVHNAKTKPREEQFNSTYRVVSVLTVLHQDWLNGKEYKCKVSNKGLPSSIEKTISKAKGQPREPQVYTLPPSQEEMTKNQVSLTCLVKGFYPSDIAVEWESNGQPENNYKTTPPVLDSDGSFFLYSRLTVDKSRWQEGNVFSCSVMHEALHNHYTQKSLSLSLG

SEQ ID NO: 848 - protein, 442 aa, synthetic construct; identical to SEQ ID NO: 847
  REGION 1..442: note = 20H5.A3-VH5VL3 heavy chain peptide sequence

SEQ ID NO: 849 - protein, 442 aa, synthetic construct
  REGION 1..442: note = 20H5.A3-VH6VL1 heavy chain peptide sequence
QVQLVQSGFELKKPGASVKISCKASGYAFTTYGMSWVRQAPGQGLEWMGWVNTYSGVPTSAQAFTGRFVFSLDTSVSTAYLQISSLKAEDTAVYYCARGPYAMDYWGQGTLVTVSSASTKGPSVFPLAPCSRSTSESTAALGCLVKDYFPEPVTVSWNSGALTSGVHTFPAVLQSSGLYSLSSVVTVPSSSLGTKTYTCNVDHKPSNTKVDKRVESKYGPPCPPCPAPEFLGGPSVFLFPPKPKDTLMISRTPEVTCVVVDVSQEDPEVQFNWYVDGVEVHNAKTKPREEQFNSTYRVVSVLTVLHQDWLNGKEYKCKVSNKGLPSSIEKTISKAKGQPREPQVYTLPPSQEEMTKNQVSLTCLVKGFYPSDIAVEWESNGQPENNYKTTPPVLDSDGSFFLYSRLTVDKSRWQEGNVFSCSVMHEALHNHYTQKSLSLSLG

SEQ ID NO: 850 - protein, 442 aa, synthetic construct; identical to SEQ ID NO: 849
  REGION 1..442: note = 20H5.A3-VH6VL3 heavy chain peptide sequence

SEQ ID NO: 851 - protein, 219 aa, synthetic construct
  REGION 1..219: note = 2D10-hVH4-HVL1 light chain peptide sequence
DIVMTQSPLSLPVTPGEPASISCRSSKSLLHSDGITYLYWYLQKPGQSPQLLIYRMSNRASGVPDRFSGSGSGTDFTLKISRVEAEDVGVYYCAQMIEFPLTFGQGTKLEIKRTVAAPSVFIFPPSDEQLKSGTASVVCLLNNFYPREAKVQWKVDNALQSGNSQESVTEQDSKDSTYSLSSTLTLSKADYEKHKVYACEVTHQGLSSPVTKSFNRGEC

SEQ ID NO: 852 - protein, 219 aa, synthetic construct
  REGION 1..219: note = 2D10-hVH4-HVL2 light chain peptide sequence
DIVMTQSPLSLPVTPGEPASISCRSSKSLLHSDGITYLYWYLQKPGQSPQLLIYRMSNLASGVPDRFSGSGSGTDFTLKISRVEAEDVGVYYCAQMIEFPLTFGQGTKLEIKRTVAAPSVFIFPPSDEQLKSGTASVVCLLNNFYPREAKVQWKVDNALQSGNSQESVTEQDSKDSTYSLSSTLTLSKADYEKHKVYACEVTHQGLSSPVTKSFNRGEC

SEQ ID NO: 853 - protein, 219 aa, synthetic construct
  REGION 1..219: note = 2D10-hVH4-HVL3 light chain peptide sequence
DVVMTQSPLSLPVTLGQPASISCRSSKSLLHSDGITYLYWYQQRPGQSPRLLIYRMSNRDSGVPDRFSGSGSGTDFTLKISRVEAEDVGVYYCAQMIEFPLTFGQGTKLEIKRTVAAPSVFIFPPSDEQLKSGTASVVCLLNNFYPREAKVQWKVDNALQSGNSQESVTEQDSKDSTYSLSSTLTLSKADYEKHKVYACEVTHQGLSSPVTKSFNRGEC

SEQ ID NO: 854 - protein, 219 aa, synthetic construct
  REGION 1..219: note = 2D10-hVH4-HVL4 light chain peptide sequence
DIVMTQSPLSLPVTLGQPASISCRSSKSLLHSDGITYLYWYQQRPGQSPQLLIYRMSNLDSGVPDRFSGSGSGTDFTLKISRVEAEDVGVYYCAQMIEFPLTFGQGTKLEIKRTVAAPSVFIFPPSDEQLKSGTASVVCLLNNFYPREAKVQWKVDNALQSGNSQESVTEQDSKDSTYSLSSTLTLSKADYEKHKVYACEVTHQGLSSPVTKSFNRGEC

SEQ ID NO: 855 - protein, 219 aa, synthetic construct; identical to SEQ ID NO: 851
  REGION 1..219: note = 2D10-hVH3-HVL1 light chain peptide sequence

SEQ ID NO: 856 - protein, 219 aa, synthetic construct; identical to SEQ ID NO: 852
  REGION 1..219: note = 2D10-hVH3-HVL2 light chain peptide sequence

SEQ ID NO: 857 - protein, 219 aa, synthetic construct; identical to SEQ ID NO: 853
  REGION 1..219: note = 2D10-hVH3-HVL3 light chain peptide sequence

SEQ ID NO: 858 - protein, 219 aa, synthetic construct; identical to SEQ ID NO: 854
  REGION 1..219: note = 2D10-hVH3-HVL4 light chain peptide sequence

SEQ ID NO: 859 - protein, 214 aa, synthetic construct
  REGION 1..214: note = 20H5.A3-VH3VL1 light chain peptide sequence
DIQMTQSPSSLSASVGDRVTITCQASQDISNYLNWYQQKPGKAPKLLIYYTSSLLTGVPSRFSGSGSGTDYTFTISSLQPEDIATYYCQQYSKLPYTFGQGTKLEIKRTVAAPSVFIFPPSDEQLKSGTASVVCLLNNFYPREAKVQWKVDNALQSGNSQESVTEQDSKDSTYSLSSTLTLSKADYEKHKVYACEVTHQGLSSPVTKSFNRGEC

SEQ ID NO: 860 - protein, 214 aa, synthetic construct
  REGION 1..214: note = 20H5.A3-VH3VL3 light chain peptide sequence
DIQMTQSPSSLSASVGDRVTITCRASQDISNYLNWYQQKPGKAPKLLIYYTSSLLSGVPSRFSGSGSGTDYTLTISSLQPEDFATYYCQQYSKLPYTFGQGTKLEIKRTVAAPSVFIFPPSDEQLKSGTASVVCLLNNFYPREAKVQWKVDNALQSGNSQESVTEQDSKDSTYSLSSTLTLSKADYEKHKVYACEVTHQGLSSPVTKSFNRGEC

SEQ ID NO: 861 - protein, 214 aa, synthetic construct; identical to SEQ ID NO: 859
  REGION 1..214: note = 20H5.A3-VH4VL1 light chain peptide sequence

SEQ ID NO: 862 - protein, 214 aa, synthetic construct; identical to SEQ ID NO: 859
  REGION 1..214: note = 20H5.A3-VH5VL1 light chain peptide sequence

SEQ ID NO: 863 - protein, 214 aa, synthetic construct; identical to SEQ ID NO: 860
  REGION 1..214: note = 20H5.A3-VH5VL3 light chain peptide sequence

SEQ ID NO: 864 - protein, 214 aa, synthetic construct; identical to SEQ ID NO: 859
  REGION 1..214: note = 20H5.A3-VH6VL1 light chain peptide sequence

SEQ ID NO: 865 - protein, 214 aa, synthetic construct; identical to SEQ ID NO: 860
  REGION 1..214: note = 20H5.A3-VH6VL3 light chain peptide sequence

SEQ ID NO: 866 - DNA, 360 bp, synthetic construct
  misc_feature 1..360: note = 2D10-hVH4-HVL1 VH DNA sequence
  source 1..360: mol_type = other DNA
caggtacagttggttcaatctggggctgaggtgaaaaagccaggggcctccgttaaggtaagctgcaaggcaagcggctacacatttacagactattatatcaactgggtgaggcaagctcctggccagcggcttgagtggatggggtggatctatccggggagtcaagacaccaaatataatgagaagttccagggacgggtgacccttacagtagacacgtctgcaagcactgcctacatggagttgtcatccctccgctctgaagatactgccgtctacttttgcgctaattacttcggaagcagcgggtggttcttcgacgtttggggccagggaactatggtcacagtgtcatca

SEQ ID NO: 867 - DNA, 360 bp, synthetic construct; identical to SEQ ID NO: 866
  misc_feature 1..360: note = 2D10-hVH4-HVL2 VH DNA sequence
  source 1..360: mol_type = other DNA

SEQ ID NO: 868 - DNA, 360 bp, synthetic construct; identical to SEQ ID NO: 866
  misc_feature 1..360: note = 2D10-hVH4-HVL3 VH DNA sequence
  source 1..360: mol_type = other DNA

SEQ ID NO: 869 - DNA, 360 bp, synthetic construct; identical to SEQ ID NO: 866
  misc_feature 1..360: note = 2D10-hVH4-HVL4 VH DNA sequence
  source 1..360: mol_type = other DNA

SEQ ID NO: 870 - DNA, 360 bp, synthetic construct
  misc_feature 1..360: note = 2D10-hVH3-HVL1 VH DNA sequence
  source 1..360: mol_type = other DNA
caagtccagctggttcagtctggtgcggaggtcaagaagccaggggcaagcgtgaaagtctcctgtaaggcaagtggatatactttcacggattactatattaactgggtcagacaggcaccaggtcaacgcctcgaatggatgggctggatatacccaggtagccaagataccaagtactcccagaaatttcagggcagggtgaccattactgtggatacttccgcttctaccgcctacatggaactcagtagcctgcgttcagaggacaccgccgtgtactattgcgctaactatttcggatcctccggatggttcttcgatgtgtggggccaggggacgatggtgacagttagctcc

SEQ ID NO: 871 - DNA, 360 bp, synthetic construct; identical to SEQ ID NO: 870
  misc_feature 1..360: note = 2D10-hVH3-HVL2 VH DNA sequence
  source 1..360: mol_type = other DNA

SEQ ID NO: 872 - DNA, 360 bp, synthetic construct; identical to SEQ ID NO: 870
  misc_feature 1..360: note = 2D10-hVH3-HVL3 VH DNA sequence
  source 1..360: mol_type = other DNA

SEQ ID NO: 873 - DNA, 360 bp, synthetic construct; identical to SEQ ID NO: 870
  misc_feature 1..360: note = 2D10-hVH3-HVL4 VH DNA sequence
  source 1..360: mol_type = other DNA

SEQ ID NO: 874 - DNA, 348 bp, synthetic construct
  misc_feature 1..348: note = 20H5.A3-VH3VL1 VH DNA sequence
  source 1..348: mol_type = other DNA
caaatccagcttgttcagagtggatcagaactcaagaagcccggagcatccgtgaaagtgtcatgcaaggccagtggctacgcttttactacatatgggatgtcttgggttcggcaggcccccggccagggactagagtggatgggctgggttaacacctatagcggagtgcctacgtacgccgatgattttacaggcaggttcgtattttctctcgaaacgtccgtcagtaccgcctacctccaaattagctctctgaaagcagaggacaccgcagtctacttttgcgccagaggtccgtatgctatggattattggggacagggcaccctggtgacagtatcctcc

SEQ ID NO: 875 - DNA, 348 bp, synthetic construct; identical to SEQ ID NO: 874
  misc_feature 1..348: note = 20H5.A3-VH3VL3 VH DNA sequence
  source 1..348: mol_type = other DNA

SEQ ID NO: 876 - DNA, 348 bp, synthetic construct
  misc_feature 1..348: note = 20H5.A3-VH4VL1 VH DNA sequence
  source 1..348: mol_type = other DNA
caaatccagttggtgcagagtggttctgagctgaagaaacctggtgcttcagttaaggtctcttgcaaagcatccggttatgcatttactacctacggaatgtcttgggtaaggcaagctcccggacagggtctcgagtggatggggtgggtgaacacctattccggcgtgcctacgtcagccgacgactttactgggcgttttgtatttagtctagagacgtctgtttcaaccgcctacctgcagatctctagcctgaaagctgaagatacagccgtatatttctgtgcccggggaccatacgccatggactactggggccaagggactctggtgaccgtttctagc

SEQ ID NO: 877 - DNA, 348 bp, synthetic construct
  misc_feature 1..348: note = 20H5.A3-VH5VL1 VH DNA sequence
  source 1..348: mol_type = other DNA
caagtgcaactggtgcagagcggctttgagctgaaaaagcccggcgcctctgtgaagatcagttgcaaagcttccggctacgcctttaccacctatggtatgtcttgggttagacaggctccaggacagggcctggagtggatgggttgggtcaatacctactctggagtgccaacctatgctcaggcattcacaggccggtttgtcttcagtctcgataccagcgtgtcaaccgcatacctgcagatcagctctcttaaagccgaggataccgctgtctactactgtgccagaggaccttatgccatggattactgggggcaaggcaccctcgtcacagtgtcttct

SEQ ID NO: 878 - DNA, 348 bp, synthetic construct; identical to SEQ ID NO: 877
  misc_feature 1..348: note = 20H5.A3-VH5VL3 VH DNA sequence
  source 1..348: mol_type = other DNA

SEQ ID NO: 879 - DNA, 348 bp, synthetic construct
  misc_feature 1..348: note = 20H5.A3-VH6VL1 VH DNA sequence
  source 1..348: mol_type = other DNA
caggttcagcttgtccaatcaggctttgagctgaagaagcctggagctagcgtcaagattagttgtaaggcctcaggctacgctttcaccacctacggaatgtcctgggtgcggcaagccccaggccagggcctggagtggatgggatgggtgaatacgtacagtggcgtccccactagcgcccaggcttttactggaagattcgtgttctctcttgatacctccgtatcaaccgcttacctgcagataagttcactcaaggctgaggataccgccgtgtattattgtgcccgagggccctacgctatggattactggggacagggcacactcgtaacagtgagctct

SEQ ID NO: 880 - DNA, 348 bp, synthetic construct; identical to SEQ ID NO: 879
  misc_feature 1..348: note = 20H5.A3-VH6VL3 VH DNA sequence
  source 1..348: mol_type = other DNA

SEQ ID NO: 881 - DNA, 336 bp, synthetic construct
  misc_feature 1..336: note = 2D10-hVH4-HVL1 VL DNA sequence
  source 1..336: mol_type = other DNA
gacatcgtgatgacccagtctcccttatccctgccagtgacaccaggagaaccagccagcatttcttgccggtctagcaaatctctgctccactctgacggaatcacgtatctgtactggtatctccaaaagcctgggcagtccccacagctgctcatttatcgaatgagtaaccgtgcatctggagtgcccgacagattttcaggctctggcagtgggactgactttacactgaagattagcagagtcgaggctgaggatgtgggggtgtattactgtgcccagatgatagaatttcccctgactttcggacaggggactaaacttgagatcaaa

SEQ ID NO: 882 - DNA, 336 bp, synthetic construct
  misc_feature 1..336: note = 2D10-hVH4-HVL2 VL DNA sequence
  source 1..336: mol_type = other DNA
gatatcgtgatgacccaaagcccactgtctttgcctgttacaccgggcgaaccagcttccatcagttgtcgctccagtaagtcacttctccacagtgacggcatcacatacctgtattggtacctccagaagccaggccaatccccccaactgttgatttatagaatgtccaatctggcatccggagtgcctgaccgcttctccggctctggatctgggacagactttactctgaagatcagcagagtggaggcggaagatgtgggggtctactattgcgctcaaatgatcgagttccctctgacttttggacagggaacgaagctcgaaattaag

SEQ ID NO: 883 - DNA, 336 bp, synthetic construct
  misc_feature 1..336: note = 2D10-hVH4-HVL3 VL DNA sequence
  source 1..336: mol_type = other DNA
gatgtggtgatgactcaaagcccacttagcctgccagttactcttggacagccagccagtatttcttgccggagttccaagagcctgttgcacagcgacgggatcacatatttatactggtaccaacagagacctgggcagtccccgcgcttgctgatctacaggatgtctaacagagactcaggggtccccgacagatttagtggctctggaagcgggacagatttcacactgaagatctcaagggtcgaagccgaggacgtgggcgtgtattactgtgcacagatgatagagttccctcttacattcggccaggggaccaaacttgaaatcaag

SEQ ID NO: 884 - DNA, 336 bp, synthetic construct
  misc_feature 1..336: note = 2D10-hVH4-HVL4 VL DNA sequence
  source 1..336: mol_type = other DNA
gacatagtgatgacccagagcccccttagccttcccgtgacactgggacagccggcgtctatttcttgtaggtcctctaaatctttgttgcacagtgatggaatcacatatctgtactggtaccagcagcggccaggacagagccctcagctgctgatatatcgaatgtcaaacctcgatagcggtgttcctgaccgcttttccggaagcggctccggcaccgactttaccttaaagatctctcgggttgaggccgaggacgtgggagtctactactgcgctcagatgatcgaatttcctctcacgttcggacaaggtacaaagttagagatcaag

SEQ ID NO: 885 - DNA, 336 bp, synthetic construct; identical to SEQ ID NO: 881
  misc_feature 1..336: note = 2D10-hVH3-HVL1 VL DNA sequence
  source 1..336: mol_type = other DNA

SEQ ID NO: 886 - DNA, 336 bp, synthetic construct; identical to SEQ ID NO: 882
  misc_feature 1..336: note = 2D10-hVH3-HVL2 VL DNA sequence
  source 1..336: mol_type = other DNA

SEQ ID NO: 887 - DNA, 336 bp, synthetic construct; identical to SEQ ID NO: 883
  misc_feature 1..336: note = 2D10-hVH3-HVL3 VL DNA sequence
  source 1..336: mol_type = other DNA

SEQ ID NO: 888 - DNA, 336 bp, synthetic construct; identical to SEQ ID NO: 884
  misc_feature 1..336: note = 2D10-hVH3-HVL4 VL DNA sequence
  source 1..336: mol_type = other DNA

SEQ ID NO: 889 - DNA, 321 bp, synthetic construct
  misc_feature 1..321: note = 20H5.A3-VH3VL1 VL DNA sequence
  source 1..321: mol_type = other DNA
gacatccagatgactcagtctccaagcagcctgtccgcttcagtcggggaccgagttacaatcacctgtcaggctagccaggacattagcaactatctgaactggtatcagcagaaacccggaaaggcccctaaacttctgatctactatacatcttcactgctgacgggtgtcccctcccggttctctggctccggctccggtaccgactatacctttactatctcatctctacagcccgaagacatcgcaacatattattgtcaacaatattctaagctgccctacactttcggccaaggaacaaagctggagattaag

SEQ ID NO: 890 - DNA, 321 bp, synthetic construct
  misc_feature 1..321: note = 20H5.A3-VH3VL3 VL DNA sequence
  source 1..321: mol_type = other DNA
gacattcagatgacccaatccccttcctccctaagcgccagcgtgggcgaccgcgtaaccatcacctgtcgagccagtcaggacatttcaaactacctgaactggtatcagcaaaaaccaggcaaagcacctaaactgctcatctactacacttccagtttgctttcaggtgtcccaagccgctttagtggatcaggttccggtaccgattacaccctgacgatctctagtctgcagccagaggacttcgctacgtactattgccagcaatatagcaagctgccctacaccttcggccagggcactaagctggaaatcaag

SEQ ID NO: 891 - DNA, 321 bp, synthetic construct; identical to SEQ ID NO: 889
  misc_feature 1..321: note = 20H5.A3-VH4VL1 VL DNA sequence
  source 1..321: mol_type = other DNA

SEQ ID NO: 892 - DNA, 321 bp, synthetic construct; identical to SEQ ID NO: 889
  misc_feature 1..321: note = 20H5.A3-VH5VL1 VL DNA sequence
  source 1..321: mol_type = other DNA

SEQ ID NO: 893 - DNA, 321 bp, synthetic construct; identical to SEQ ID NO: 890
  misc_feature 1..321: note = 20H5.A3-VH5VL3 VL DNA sequence
  source 1..321: mol_type = other DNA

SEQ ID NO: 894 - DNA, 321 bp, synthetic construct; identical to SEQ ID NO: 889
  misc_feature 1..321: note = 20H5.A3-VH6VL1 VL DNA sequence
  source 1..321: mol_type = other DNA

SEQ ID NO: 895 - DNA, 321 bp, synthetic construct; identical to SEQ ID NO: 890
  misc_feature 1..321: note = 20H5.A3-VH6VL3 VL DNA sequence
  source 1..321: mol_type = other DNA

SEQ ID NO: 896 - DNA, 1344 bp, synthetic construct
  misc_feature 1..1344: note = 2D10-hVH4-HVL1 heavy chain DNA sequence
  source 1..1344: mol_type = other DNA
caggtacagttggttcaatctggggctgaggtgaaaaagccaggggcctccgttaaggtaagctgcaaggcaagcggctacacatttacagactattatatcaactgggtgaggcaagctcctggccagcggcttgagtggatggggtggatctatccggggagtcaagacaccaaatataatgagaagttccagggacgggtgacccttacagtagacacgtctgcaagcactgcctacatggagttgtcatccctccgctctgaagatactgccgtctacttttgcgctaattacttcggaagcagcgggtggttcttcgacgtttggggccagggaactatggtcacagtgtcatcagctagcaccaagggccccagcgtgtttcctctcgctccctgcagccggagcacatccgagagcaccgctgctctgggctgtctcgtgaaggactacttccctgaacccgtcaccgtcagctggaatagcggcgccctgacatccggcgtccacacattccccgctgtcctgcagagcagcggcctgtacagcctgagctccgtggtcaccgtgcctagcagcagcctgggaacaaagacctacacctgcaacgtggaccataagccctccaacaccaaggtggacaagcgggtggaatccaagtatggacccccctgtcctccttgccctgctcctgaatttctcggaggcccctccgtcttcctgtttccccccaagcccaaggacaccctgatgatctcccggacacccgaagtcacctgcgtcgtggtggatgtcagccaggaagatcccgaggtgcagttcaactggtacgtggacggagtggaggtgcataacgccaaaaccaagcccagggaagagcagttcaacagcacctatcgggtcgtgtccgtgctcaccgtcctgcatcaggattggctcaacggcaaggagtacaagtgcaaggtgtccaacaagggcctgccctcctccatcgagaagaccatctccaaggctaagggccaacctcgggagccccaagtgtataccctccctcccagccaggaggagatgaccaagaatcaagtgagcctgacctgcctcgtgaagggattttacccctccgacatcgctgtggaatgggaaagcaatggccaacctgagaacaactacaagaccacaccccccgtgctggactccgatggctccttcttcctgtacagcaggctgaccgtggacaaatcccggtggcaagagggaaacgtgttcagctgctccgtgatgcacgaggctctccacaaccactacacccagaagagcctctccctgagcctcggctagtaa

SEQ ID NO: 897 - DNA, 1344 bp, synthetic construct; identical to SEQ ID NO: 896
  misc_feature 1..1344: note = 2D10-hVH4-HVL2 heavy chain DNA sequence
  source 1..1344: mol_type = other DNA

SEQ ID NO: 898 - DNA, 1344 bp, synthetic construct; identical to SEQ ID NO: 896
  misc_feature 1..1344: note = 2D10-hVH4-HVL3 heavy chain DNA sequence
  source 1..1344: mol_type = other DNA

SEQ ID NO: 899 - DNA, 1344 bp, synthetic construct; identical to SEQ ID NO: 896
  misc_feature 1..1344: note = 2D10-hVH4-HVL4 heavy chain DNA sequence
  source 1..1344: mol_type = other DNA

SEQ ID NO: 900 - DNA, 1344 bp, synthetic construct
  misc_feature 1..1344: note = 2D10-hVH3-HVL1 heavy chain DNA sequence
  source 1..1344: mol_type = other DNA
caagtccagctggttcagtctggtgcggaggtcaagaagccaggggcaagcgtgaaagtctcctgtaaggcaagtggatatactttcacggattactatattaactgggtcagacaggcaccaggtcaacgcctcgaatggatgggctggatatacccaggtagccaagataccaagtactcccagaaatttcagggcagggtgaccattactgtggatacttccgcttctaccgcctacatggaactcagtagcctgcgttcagaggacaccgccgtgtactattgcgctaactatttcggatcctccggatggttcttcgatgtgtggggccaggggacgatggtgacagttagctccgctagcaccaagggccccagcgtgtttcctctcgctccctgcagccggagcacatccgagagcaccgctgctctgggctgtctcgtgaaggactacttccctgaacccgtcaccgtcagctggaatagcggcgccctgacatccggcgtccacacattccccgctgtcctgcagagcagcggcctgtacagcctgagctccgtggtcaccgtgcctagcagcagcctgggaacaaagacctacacctgcaacgtggaccataagccctccaacaccaaggtggacaagcgggtggaatccaagtatggacccccctgtcctccttgccctgctcctgaatttctcggaggcccctccgtcttcctgtttccccccaagcccaaggacaccctgatgatctcccggacacccgaagtcacctgcgtcgtggtggatgtcagccaggaagatcccgaggtgcagttcaactggtacgtggacggagtggaggtgcataacgccaaaaccaagcccagggaagagcagttcaacagcacctatcgggtcgtgtccgtgctcaccgtcctgcatcaggattggctcaacggcaaggagtacaagtgcaaggtgtccaacaagggcctgccctcctccatcgagaagaccatctccaaggctaagggccaacctcgggagccccaagtgtataccctccctcccagccaggaggagatgaccaagaatcaagtgagcctgacctgcctcgtgaagggattttacccctccgacatcgctgtggaatgggaaagcaatggccaacctgagaacaactacaagaccacaccccccgtgctggactccgatggctccttcttcctgtacagcaggctgaccgtggacaaatcccggtggcaagagggaaacgtgttcagctgctccgtgatgcacgaggctctccacaaccactacacccagaagagcctctccctgagcctcggctagtaa

SEQ ID NO: 901 - DNA, 1344 bp, synthetic construct; identical to SEQ ID NO: 900
  misc_feature 1..1344: note = 2D10-hVH3-HVL2 heavy chain DNA sequence
  source 1..1344: mol_type = other DNA

SEQ ID NO: 902 - DNA, 1344 bp, synthetic construct; identical to SEQ ID NO: 900
  misc_feature 1..1344: note = 2D10-hVH3-HVL3 heavy chain DNA sequence
  source 1..1344: mol_type = other DNA

SEQ ID NO: 903 - DNA, 1344 bp, synthetic construct; identical to SEQ ID NO: 900
  misc_feature 1..1344: note = 2D10-hVH3-HVL4 heavy chain DNA sequence
  source 1..1344: mol_type = other DNA

SEQ ID NO: 904 - DNA, 1332 bp, synthetic construct
  misc_feature 1..1332: note = 20H5.A3-VH3VL1 heavy chain DNA sequence
  source 1..1332: mol_type = other DNA
caaatccagcttgttcagagtggatcagaactcaagaagcccggagcatccgtgaaagtgtcatgcaaggccagtggctacgcttttactacatatgggatgtcttgggttcggcaggcccccggccagggactagagtggatgggctgggttaacacctatagcggagtgcctacgtacgccgatgattttacaggcaggttcgtattttctctcgaaacgtccgtcagtaccgcctacctccaaattagctctctgaaagcagaggacaccgcagtctacttttgcgccagaggtccgtatgctatggattattggggacagggcaccctggtgacagtatcctccgctagcaccaagggccccagcgtgtttcctctcgctccctgcagccggagcacatccgagagcaccgctgctctgggctgtctcgtgaaggactacttccctgaacccgtcaccgtcagctggaatagcggcgccctgacatccggcgtccacacattccccgctgtcctgcagagcagcggcctgtacagcctgagctccgtggtcaccgtgcctagcagcagcctgggaacaaagacctacacctgcaacgtggaccataagccctccaacaccaaggtggacaagcgggtggaatccaagtatggacccccctgtcctccttgccctgctcctgaatttctcggaggcccctccgtcttcctgtttccccccaagcccaaggacaccctgatgatctcccggacacccgaagtcacctgcgtcgtggtggatgtcagccaggaagatcccgaggtgcagttcaactggtacgtggacggagtggaggtgcataacgccaaaaccaagcccagggaagagcagttcaacagcacctatcgggtcgtgtccgtgctcaccgtcctgcatcaggattggctcaacggcaaggagtacaagtgcaaggtgtccaacaagggcctgccctcctccatcgagaagaccatctccaaggctaagggccaacctcgggagccccaagtgtataccctccctcccagccaggaggagatgaccaagaatcaagtgagcctgacctgcctcgtgaagggattttacccctccgacatcgctgtggaatgggaaagcaatggccaacctgagaacaactacaagaccacaccccccgtgctggactccgatggctccttcttcctgtacagcaggctgaccgtggacaaatcccggtggcaagagggaaacgtgttcagctgctccgtgatgcacgaggctctccacaaccactacacccagaagagcctctccctgagcctcggctagtaa

SEQ ID NO: 905 - DNA, 1332 bp, synthetic construct; identical to SEQ ID NO: 904
  misc_feature 1..1332: note = 20H5.A3-VH3VL3 heavy chain DNA sequence
  source 1..1332: mol_type = other DNA

SEQ ID NO: 906 - DNA, 1331 bp, synthetic construct
  misc_feature 1..1331: note = 20H5.A3-VH4VL1 heavy chain DNA sequence
  source 1..1331: mol_type = other DNA
caaatccagttggtgcagagtggttctgagctgaagaaacctggtgcttcagttaaggtctcttgcaaagcatccggttatgcatttactacctacggaatgtcttgggtaaggcaagctcccggacagggtctcgagtggatggggtgggtgaacacctattccggcgtgcctacgtcagccgacgactttactgggcgttttgtatttagtctagagacgtctgtttcaaccgcctacctgcagatctctagcctgaaagctgaagatacagccgtatatttctgtgcccggggaccatacgccatggactactggggccaagggactctggtgaccgtttctagcgctagcaccaagggccccagcgtgtttcctctcgctccctgcagccggagcacatccgagagcaccgctgctctgggctgtctcgtgaaggactacttccctgaacccgtcaccgtcagctggaatagcggcgccctgacatccggcgtccacacattccccgctgtcctgcagagcagcggcctgtacagcctgagctccgtggtcaccgtgcctagcagcagcctgggaacaaagacctacacctgcaacgtggaccataagccctccaacaccaaggtggacaagcgggtggaatccaagtatggacccccctgtcctccttgccctgctcctgaatttctcggaggcccctccgtcttcctgtttccccccaagcccaaggacaccctgatgatctcccggacacccgaagtcacctgcgtcgtggtggatgtcagccaggaagatcccgaggtgcagttcaactggtacgtggacggagtggaggtgcataacgccaaaaccaagcccagggaagagcagttcaacagcacctatcgggtcgtgtccgtgctcaccgtcctgcatcaggattggctcaacggcaaggagtacaagtgcaaggtgtccaacaagggcctgccctcctccatcgagaagaccatctccaaggctaagggccaacctcgggagccccaagtgtataccctccctcccagccaggaggagatgaccaagaatcaagtgagcctgacctgcctcgtgaagggattttacccctccgacatcgctgtggaatgggaaagcaatggccaacctgagaacaactacaagaccacaccccccgtgctggactccgatggctccttcttcctgtacagcaggctgaccgtggacaaatcccggtggcaagagggaaacgtgttcagctgctccgtgatgcacgaggctctccacaaccactacacccagaagagcctctccctgagcctcggctagta

SEQ ID NO: 907 - DNA, 1332 bp, synthetic construct
  misc_feature 1..1332: note = 20H5.A3-VH5VL1 heavy chain DNA sequence
  source 1..1332: mol_type = other DNA
caagtgcaactggtgcagagcggctttgagctgaaaaagcccggcgcctctgtgaagatcagttgcaaagcttccggctacgcctttaccacctatggtatgtcttgggttagacaggctccaggacagggcctggagtggatgggttgggtcaatacctactctggagtgccaacctatgctcaggcattcacaggccggtttgtcttcagtctcgataccagcgtgtcaaccgcatacctgcagatcagctctcttaaagccgaggataccgctgtctactactgtgccagaggaccttatgccatggattactgggggcaaggcaccctcgtcacagtgtcttctgctagcaccaagggccccagcgtgtttcctctcgctccctgcagccggagcacatccgagagcaccgctgctctgggctgtctcgtgaaggactacttccctgaacccgtcaccgtcagctggaatagcggcgccctgacatccggcgtccacacattccccgctgtcctgcagagcagcggcctgtacagcctgagctccgtggtcaccgtgcctagcagcagcctgggaacaaagacctacacctgcaacgtggaccataagccctccaacaccaaggtggacaagcgggtggaatccaagtatggacccccctgtcctccttgccctgctcctgaatttctcggaggcccctccgtcttcctgtttccccccaagcccaaggacaccctgatgatctcccggacacccgaagtcacctgcgtcgtggtggatgtcagccaggaagatcccgaggtgcagttcaactggtacgtggacggagtggaggtgcataacgccaaaaccaagcccagggaagagcagttcaacagcacctatcgggtcgtgtccgtgctcaccgtcctgcatcaggattggctcaacggcaaggagtacaagtgcaaggtgtccaacaagggcctgccctcctccatcgagaagaccatctccaaggctaagggccaacctcgggagccccaagtgtataccctccctcccagccaggaggagatgaccaagaatcaagtgagcctgacctgcctcgtgaagggattttacccctccgacatcgctgtggaatgggaaagcaatggccaacctgagaacaactacaagaccacaccccccgtgctggactccgatggctccttcttcctgtacagcaggctgaccgtggacaaatcccggtggcaagagggaaacgtgttcagctgctccgtgatgcacgaggctctccacaaccactacacccagaagagcctctccctgagcctcggctagtaa

SEQ ID NO: 908 - DNA, 1332 bp, synthetic construct; identical to SEQ ID NO: 907
  misc_feature 1..1332: note = 20H5.A3-VH5VL3 heavy chain DNA sequence
  source 1..1332: mol_type = other DNA

SEQ ID NO: 909 - DNA, 1332 bp, synthetic construct
  misc_feature 1..1332: note = 20H5.A3-VH6VL1 heavy chain DNA sequence
  source 1..1332: mol_type = other DNA
caggttcagcttgtccaatcaggctttgagctgaagaagcctggagctagcgtcaagattagttgtaaggcctcaggctacgctttcaccacctacggaatgtcctgggtgcggcaagccccaggccagggcctggagtggatgggatgggtgaatacgtacagtggcgtccccactagcgcccaggcttttactggaagattcgtgttctctcttgatacctccgtatcaaccgcttacctgcagataagttcactcaaggctgaggataccgccgtgtattattgtgcccgagggccctacgctatggattactggggacagggcacactcgtaacagtgagctctgctagcaccaagggccccagcgtgtttcctctcgctccctgcagccggagcacatccgagagcaccgctgctctgggctgtctcgtgaaggactacttccctgaacccgtcaccgtcagctggaatagcggcgccctgacatccggcgtccacacattccccgctgtcctgcagagcagcggcctgtacagcctgagctccgtggtcaccgtgcctagcagcagcctgggaacaaagacctacacctgcaacgtggaccataagccctccaacaccaaggtggacaagcgggtggaatccaagtatggacccccctgtcctccttgccctgctcctgaatttctcggaggcccctccgtcttcctgtttccccccaagcccaaggacaccctgatgatctcccggacacccgaagtcacctgcgtcgtggtggatgtcagccaggaagatcccgaggtgcagttcaactggtacgtggacggagtggaggtgcataacgccaaaaccaagcccagggaagagcagttcaacagcacctatcgggtcgtgtccgtgctcaccgtcctgcatcaggattggctcaacggcaaggagtacaagtgcaaggtgtccaacaagggcctgccctcctccatcgagaagaccatctccaaggctaagggccaacctcgggagccccaagtgtataccctccctcccagccaggaggagatgaccaagaatcaagtgagcctgacctgcctcgtgaagggattttacccctccgacatcgctgtggaatgggaaagcaatggccaacctgagaacaactacaagaccacaccccccgtgctggactccgatggctccttcttcctgtacagcaggctgaccgtggacaaatcccggtggcaagagggaaacgtgttcagctgctccgtgatgcacgaggctctccacaaccactacacccagaagagcctctccctgagcctcggctagtaa

SEQ ID NO: 910 - DNA, 1332 bp, synthetic construct; identical to SEQ ID NO: 909
  misc_feature 1..1332: note = 20H5.A3-VH6VL3 heavy chain DNA sequence
  source 1..1332: mol_type = other DNA

SEQ ID NO: 911 - DNA, 660 bp, synthetic construct
  misc_feature 1..660: note = 2D10-hVH4-HVL1 light chain DNA sequence
  source 1..660: mol_type = other DNA
gacatcgtgatgacccagtctcccttatccctgccagtgacaccaggagaaccagccagcatttcttgccggtctagcaaatctctgctccactctgacggaatcacgtatctgtactggtatctccaaaagcctgggcagtccccacagctgctcatttatcgaatgagtaaccgtgcatctggagtgcccgacagattttcaggctctggcagtgggactgactttacactgaagattagcagagtcgaggctgaggatgtgggggtgtattactgtgcccagatgatagaatttcccctgactttcggacaggggactaaacttgagatcaaaaggaccgtggccgcccccagcgtgttcatcttccctcccagcgacgagcagctgaagtctggcaccgccagcgtggtgtgcctgctgaacaacttctacccccgcgaggccaaggtgcagtggaaggtggacaacgccctgcagagcggcaacagccaggagagcgtgaccgagcaggactccaaggacagcacctacagcctgagcagcaccctgaccctgagcaaggccgactacgagaagcacaaggtgtacgcctgcgaggtgacccaccagggactgtctagccccgtgaccaagagcttcaaccggggcgagtgctaa

SEQ ID NO: 912 - DNA, 660 bp, synthetic construct
  misc_feature 1..660: note = 2D10-hVH4-HVL2 light chain DNA sequence
  source 1..660: mol_type = other DNA
gatatcgtgatgacccaaagcccactgtctttgcctgttacaccgggcgaaccagcttccatcagttgtcgctccagtaagtcacttctccacagtgacggcatcacatacctgtattggtacctccagaagccaggccaatccccccaactgttgatttatagaatgtccaatctggcatccggagtgcctgaccgcttctccggctctggatctgggacagactttactctgaagatcagcagagtggaggcggaagatgtgggggtctactattgcgctcaaatgatcgagttccctctgacttttggacagggaacgaagctcgaaattaagaggaccgtggccgcccccagcgtgttcatcttccctcccagcgacgagcagctgaagtctggcaccgccagcgtggtgtgcctgctgaacaacttctacccccgcgaggccaaggtgcagtggaaggtggacaacgccctgcagagcggcaacagccaggagagcgtgaccgagcaggactccaaggacagcacctacagcctgagcagcaccctgaccctgagcaaggccgactacgagaagcacaaggtgtacgcctgcgaggtgacccaccagggactgtctagccccgtgaccaagagcttcaaccggggcgagtgctaa

SEQ ID NO: 913 - DNA, 660 bp, synthetic construct
  misc_feature 1..660: note = 2D10-hVH4-HVL3 light chain DNA sequence
  source 1..660: mol_type = other DNA
gatgtggtgatgactcaaagcccacttagcctgccagttactcttggacagccagccagtatttcttgccggagttccaagagcctgttgcacagcgacgggatcacatatttatactggtaccaacagagacctgggcagtccccgcgcttgctgatctacaggatgtctaacagagactcaggggtccccgacagatttagtggctctggaagcgggacagatttcacactgaagatctcaagggtcgaagccgaggacgtgggcgtgtattactgtgcacagatgatagagttccctcttacattcggccaggggaccaaacttgaaatcaagaggaccgtggccgcccccagcgtgttcatcttccctcccagcgacgagcagctgaagtctggcaccgccagcgtggtgtgcctgctgaacaacttctacccccgcgaggccaaggtgcagtggaaggtggacaacgccctgcagagcggcaacagccaggagagcgtgaccgagcaggactccaaggacagcacctacagcctgagcagcaccctgaccctgagcaaggccgactacgagaagcacaaggtgtacgcctgcgaggtgacccaccagggactgtctagccccgtgaccaagagcttcaaccggggcgagtgctaa

SEQ ID NO: 914 - DNA, 660 bp, synthetic construct
  misc_feature 1..660: note = 2D10-hVH4-HVL4 light chain DNA sequence
  source 1..660: mol_type = other DNA
gacatagtgatgacccagagcccccttagccttcccgtgacactgggacagccggcgtctatttcttgtaggtcctctaaatctttgttgcacagtgatggaatcacatatctgtactggtaccagcagcggccaggacagagccctcagctgctgatatatcgaatgtcaaacctcgatagcggtgttcctgaccgcttttccggaagcggctccggcaccgactttaccttaaagatctctcgggttgaggccgaggacgtgggagtctactactgcgctcagatgatcgaatttcctctcacgttcggacaaggtacaaagttagagatcaagaggaccgtggccgcccccagcgtgttcatcttccctcccagcgacgagcagctgaagtctggcaccgccagcgtggtgtgcctgctgaacaacttctacccccgcgaggccaaggtgcagtggaaggtggacaacgccctgcagagcggcaacagccaggagagcgtgaccgagcaggactccaaggacagcacctacagcctgagcagcaccctgaccctgagcaaggccgactacgagaagcacaaggtgtacgcctgcgaggtgacccaccagggactgtctagccccgtgaccaagagcttcaaccggggcgagtgctaa

SEQ ID NO: 915 - DNA, 660 bp, synthetic construct; identical to SEQ ID NO: 911
  misc_feature 1..660: note = 2D10-hVH3-HVL1 light chain DNA sequence
  source 1..660: mol_type = other DNA

SEQ ID NO: 916 - DNA, 660 bp, synthetic construct; identical to SEQ ID NO: 912
  misc_feature 1..660: note = 2D10-hVH3-HVL2 light chain DNA sequence
  source 1..660: mol_type = other DNA

SEQ ID NO: 917 - DNA, 660 bp, synthetic construct; identical to SEQ ID NO: 913
  misc_feature 1..660: note = 2D10-hVH3-HVL3 light chain DNA sequence
  source 1..660: mol_type = other DNA

SEQ ID NO: 918 - DNA, 660 bp, synthetic construct; identical to SEQ ID NO: 914
  misc_feature 1..660: note = 2D10-hVH3-HVL4 light chain DNA sequence
  source 1..660: mol_type = other DNA

SEQ ID NO: 919 - DNA, 645 bp, synthetic construct
  misc_feature 1..645: note = 20H5.A3-VH3VL1 light chain DNA sequence
  source 1..645: mol_type = other DNA
gacatccagatgactcagtctccaagcagcctgtccgcttcagtcggggaccgagttacaatcacctgtcaggctagccaggacattagcaactatctgaactggtatcagcagaaacccggaaaggcccctaaacttctgatctactatacatcttcactgctgacgggtgtcccctcccggttctctggctccggctccggtaccgactatacctttactatctcatctctacagcccgaagacatcgcaacatattattgtcaacaatattctaagctgccctacactttcggccaaggaacaaagctggagattaagaggaccgtggccgcccccagcgtgttcatcttccctcccagcgacgagcagctgaagtctggcaccgccagcgtggtgtgcctgctgaacaacttctacccccgcgaggccaaggtgcagtggaaggtggacaacgccctgcagagcggcaacagccaggagagcgtgaccgagcaggactccaaggacagcacctacagcctgagcagcaccctgaccctgagcaaggccgactacgagaagcacaaggtgtacgcctgcgaggtgacccaccagggactgtctagccccgtgaccaagagcttcaaccggggcgagtgctaa

SEQ ID NO: 920 - DNA, 645 bp, synthetic construct
  misc_feature 1..645: note = 20H5.A3-VH3VL3 light chain DNA sequence
  source 1..645: mol_type = other DNA
gacattcagatgacccaatccccttcctccctaagcgccagcgtgggcgaccgcgtaaccatcacctgtcgagccagtcaggacatttcaaactacctgaactggtatcagcaaaaaccaggcaaagcacctaaactgctcatctactacacttccagtttgctttcaggtgtcccaagccgctttagtggatcaggttccggtaccgattacaccctgacgatctctagtctgcagccagaggacttcgctacgtactattgccagcaatatagcaagctgccctacaccttcggccagggcactaagctggaaatcaagaggaccgtggccgcccccagcgtgttcatcttccctcccagcgacgagcagctgaagtctggcaccgccagcgtggtgtgcctgctgaacaacttctacccccgcgaggccaaggtgcagtggaaggtggacaacgccctgcagagcggcaacagccaggagagcgtgaccgagcaggactccaaggacagcacctacagcctgagcagcaccctgaccctgagcaaggccgactacgagaagcacaaggtgtacgcctgcgaggtgacccaccagggactgtctagccccgtgaccaagagcttcaaccggggcgagtgctaa

SEQ ID NO: 921 - DNA, 645 bp, synthetic construct; identical to SEQ ID NO: 919
  misc_feature 1..645: note = 20H5.A3-VH4VL1 light chain DNA sequence
  source 1..645: mol_type = other DNA

SEQ ID NO: 922 - DNA, 645 bp, synthetic construct; identical to SEQ ID NO: 919
  misc_feature 1..645: note = 20H5.A3-VH5VL1 light chain DNA sequence
  source 1..645: mol_type = other DNA

SEQ ID NO: 923 - DNA, 645 bp, synthetic construct; identical to SEQ ID NO: 920
  misc_feature 1..645: note = 20H5.A3-VH5VL3 light chain DNA sequence
  source 1..645: mol_type = other DNA

SEQ ID NO: 924 - DNA, 645 bp, synthetic construct; identical to SEQ ID NO: 919
  misc_feature 1..645: note = 20H5.A3-VH6VL1 light chain DNA sequence
  source 1..645: mol_type = other DNA

SEQ ID NO: 925 - DNA, 645 bp, synthetic construct; identical to SEQ ID NO: 920
  misc_feature 1..645: note = 20H5.A3-VH6VL3 light chain DNA sequence
  source 1..645: mol_type = other DNA

SEQ ID NO: 926 - DNA, 21 bp, synthetic construct
  misc_feature 1..21: note = IFNg-2 forward primer
  source 1..21: mol_type = other DNA
acagcaaggcgaaaaaggatg

SEQ ID NO: 927 - DNA, 19 bp, synthetic construct
  misc_feature 1..19: note = IFNg-2 reverse primer
  source 1..19: mol_type = other DNA
tggtggaccactcggatga

SEQ ID NO: 928 - DNA, 23 bp, synthetic construct
  misc_feature 1..23: note = IL1beta forward primer
  source 1..23: mol_type = other DNA
atgatggcttattacagtggcaa

SEQ ID NO: 929 - DNA, 20 bp, synthetic construct
  misc_feature 1..20: note = IL1beta reverse primer
  source 1..20: mol_type = other DNA
gtcggacattcgtagctgga

SEQ ID NO: 930 - DNA, 23 bp, synthetic construct
  misc_feature 1..23: note = IL10-1 forward primer
  source 1..23: mol_type = other DNA
cttactgactggcatgaggatca

SEQ ID NO: 931 - DNA, 20 bp, synthetic construct
  misc_feature 1..20: note = IL10-1 reverse primer
  source 1..20: mol_type = other DNA
gcagctctaggagcatgtgg

SEQ ID NO: 932 - DNA, 20 bp, synthetic construct
  misc_feature 1..20: note = IL17a forward primer
  source 1..20: mol_type = other DNA
tgagcttcccagatcacaga

SEQ ID NO: 933 - DNA, 20 bp, synthetic construct
  misc_feature 1..20: note = IL17a reverse primer
  source 1..20: mol_type = other DNA
tccagaaggccctcagacta

SEQ ID NO: 934 - DNA, 20 bp, synthetic construct
  misc_feature 1..20: note = IL21 forward primer
  source 1..20: mol_type = other DNA
cgcctcctgattagacttcg

SEQ ID NO: 935 - DNA, 21 bp, synthetic construct
  misc_feature 1..21: note = IL21 reverse primer
  source 1..21: mol_type = other DNA
tgggtgtccttttctcatacg

SEQ ID NO: 936 - DNA, 20 bp, synthetic construct
  misc_feature 1..20: note = IL22 forward primer
  source 1..20: mol_type = other DNA
tcgccttgatctctccactc

SEQ ID NO: 937 - DNA, 20 bp, synthetic construct
  misc_feature 1..20: note = IL22 reverse primer
  source 1..20: mol_type = other DNA
gctcagctcctgtcacatca

SEQ ID NO: 938 - DNA, 20 bp, synthetic construct
  misc_feature 1..20: note = TGFbeta-2 forward primer
  source 1..20: mol_type = other DNA
gagcccgaagcggactacta

SEQ ID NO: 939 - DNA, 23 bp, synthetic construct
  misc_feature 1..23: note = TGFbeta-2 reverse primer
  source 1..23: mol_type = other DNA
tggttttctcatagatggcgttg

SEQ ID NO: 940 - protein, 112 aa, synthetic construct
  REGION 1..112: note = VH-78 Peptide Sequence
QVQLKQSGPELVKPGDSVKISCKAAGYTFSDYYINWVKQRPGQGLEWIGWIYPVSVNTKYNEKFKGKATLTVDTSSSTAYMQLSSLTSEDSGVYFCAYLDYWGQGTLVTVSA

SEQ ID NO: 941 - protein, 112 aa, synthetic construct
  REGION 1..112: note = VL-75 Peptide Sequence
DVVMTQTPLTLSVTIGQPASISCKSSQSLFHSDGKTYLNWLLQRPGQSPKRLIYLVSKLDSGVPDRFTGSGSGTDFTLKISRVEAEDLGVYYCWQGTHFPLTFGAGTKLEMK

SEQ ID NO: 942 - protein, 112 aa, synthetic construct
  REGION 1..112: note = VL-76 Peptide Sequence
DVVMTQTPLTLSVTIGQPASISCKSSQSLLHSDGKTYLNWLLQRPGQPPKRLMYLVSTLDSGVPDRFTGSGSGTDFTLKISRVEAEDLGVYYCWQGTHFPLTFGAGTKPELK

SEQ ID NO: 943 - protein, 112 aa, synthetic construct
  REGION 1..112: note = VL-77 Peptide Sequence
DIVMTQAAFSNPVTLGTSASISCRSSKSLLHSDGITYFYWYLQRPGQSPQLLIYRMSNLASGVPDRFSGSGSGTDFTLRISRVEAEDVGVYYCAQMLEFPLTFGAGTKLERA

SEQ ID NO: 944 - protein, 125 aa, synthetic construct
  REGION 1..125: note = Exemplary hIgG1, Ch2 constant heavy chain domain 2. Fc region
EPKSCDKTHTCPPCPAPELLGGPSVFLFPPKPKDTLMISRTPEVTCVVVDVSHEDPEVKFNWYVDGVEVHNAKTKPREEQYNSTYRVVSVLTVLHQDWLNGKEYKCKVSNKALPAPIEKTISKAK

SEQ ID NO: 945 - protein, 326 aa, synthetic construct
  REGION 1..326: note = Exemplary hIgG4 Fc region (S228P)
ASTKGPSVFPLAPCSRSTSESTAALGCLVKDYFPEPVTVSWNSGALTSGVHTFPAVLQSSGLYSLSSVVTVPSSSLGTKTYTCNVDHKPSNTKVDKRVESKYGPPCPPCPAPEFLGGPSVFLFPPKPKDTLMISRTPEVTCVVVDVSQEDPEVQFNWYVDGVEVHNAKTKPREEQFNSTYRVVSVLTVLHQDWLNGKEYKCKVSNKGLPSSIEKTISKAKGQPREPQVYTLPPSQEEMTKNQVSLTCLVKGFYPSDIAVEWESNGQPENNYKTTPPVLDSDGSFFLYSRLTVDKSRWQEGNVFSCSVMHEALHNHYTQKSLSLSLG

SEQ ID NO: 946 - protein, 107 aa, synthetic construct [sequence omitted]

SEQ ID NO: 947 - protein, 330 aa, synthetic construct
  REGION 1..330: note = Exemplary mIgG2A(LALAPG) Fc region
AKTTPPSVYPLAPVCGDTTGSSVTLGCLVKGYFPEPVTLTWNSGSLSSGVHTFPAVLQSDLYTLSSSVTVTSSTWPSQSITCNVAHPASSTKVDKKIEPRGPTIKPCPPCKCPAPNAAGGPSVFIFPPKIKDVLMISLSPIVTCVVVDVSEDDPDVQISWFVNNVEVHTAQTQTHREDYNSTLRVVSALPIQHQDWMSGKEFKCKVNNKDLGAPIERTISKPKGSVRAPQVYVLPPPEEEMTKKQVTLTCMVTDFMPEDIYVEWTNNGKTELNYKNTEPVLDSDGSYFMYSKLRVEKKNWVERNSYSCSVVHEGLHNHHTTKSFSRTPGK

SEQ ID NO: 948 - protein, 330 aa, synthetic construct
  REGION 1..330: note = Exemplary mIgG2A(LALA) Fc region
AKTTPPSVYPLAPVCGDTTGSSVTLGCLVKGYFPEPVTLTWNSGSLSSGVHTFPAVLQSDLYTLSSSVTVTSSTWPSQSITCNVAHPASSTKVDKKIEPRGPTIKPCPPCKCPAPNAAGGPSVFIFPPKIKDVLMISLSPIVTCVVVDVSEDDPDVQISWFVNNVEVHTAQTQTHREDYNSTLRVVSALPIQHQDWMSGKEFKCKVNNKDLPAPIERTISKPKGSVRAPQVYVLPPPEEEMTKKQVTLTCMVTDFMPEDIYVEWTNNGKTELNYKNTEPVLDSDGSYFMYSKLRVEKKNWVERNSYSCSVVHEGLHNHHTTKSFSRTPGK

SEQ ID NO: 949 - protein, 1382 aa, Homo sapiens
MATGGRRGAAAAPLLVAVAALLLGAAGHLYPGEVCPGMDIRNNLTRLHELENCSVIEGHLQILLMFKTRPEDFRDLSFPKLIMITDYLLLFRVYGLESLKDLFPNLTVIRGSRLFFNYALVIFEMVHLKELGLYNLMNITRGSVRIEKNNELCYLATIDWSRILDSVEDNYIVLNKDDNEECGDICPGTAKGKTNCPATVINGQFVERCWTHSHCQKVCPTICKSHGCTAEGLCCHSECLGNCSQPDDPTKCVACRNFYLDGRCVETCPPPYYHFQDWRCVNFSFCQDLHHKCKNSRRQGCHQYVIHNNKCIPECPSGYTMNSSNLLCTPCLGPCPKVCHLLEGEKTIDSVTSAQELRGCTVINGSLIINIRGGNNLAAELEANLGLIEEISGYLKIRRSYALVSLSFFRKLRLIRGETLEIGNYSFYALDNQNLRQLWDWSKHNLTITQGKLFFHYNPKLCLSEIHKMEEVSGTKGRQERNDIALKTNGDQASCENELLKFSYIRTSFDKILLRWEPYWPPDFRDLLGFMLFYKEAPYQNVTEFDGQDACGSNSWTVVDIDPPLRSNDPKSQNHPGWLMRGLKPWTQYAIFVKTLVTFSDERRTYGAKSDIIYVQTDATNPSVPLDPISVSNSSSQIILKWKPPSDPNGNITHYLVFWERQAEDSELFELDYCLKGLKLPSRTWSPPFESEDSQKHNQSEYEDSAGECCSCPKTDSQILKELEESSFRKTFEDYLHNVVFVPRKTSSGTGAEDPRPSRKRRSLGDVGNVTVAVPTVAAFPNTSSTSVPTSPEEHRPFEKVVNKESLVISGLRHFTGYRIELQACNQDTPEERCSVAAYVSARTMPEAKADDIVGPVTHEIFENNVVHLMWQEPKEPNGLIVLYEVSYRRYGDEELHLCVSRKHFALERGCRLRGLSPGNYSVRIRATSLAGNGSWTEPTYFYVTDYLDVPSNIAKIIIGPLIFVFLFSVVIGSIYLFLRKRQPDGPLGPLYASSNPEYLSASDVFPCSVYVPDEWEVSREKITLLRELGQGSFGMVYEGNARDIIKGEAETRVAVKTVNESASLRERIEFLNEASVMKGFTCHHVVRLLGVVSKGQPTLVVMELMAHGDLKSYLRSLRPEAENNPGRPPPTLQEMIQMAAEIADGMAYLNAKKFVHRDLAARNCMVAHDFTVKIGDFGMTRDIYETDYYRKGGKGLLPVRWMAPESLKDGVFTTSSDMWSFGVVLWEITSLAEQPYQGLSNEQVLKFVMDGGYLDQPDNCPERVTDLMRMCWQFNPKMRPTFLEIVNLLKDDLHPSFPEVSFFHSEENKAPESEELEMEFEDMENVPLDRSSHCQREEAGGRDGGSSLGFKRSYEEHIPYTHMNGGKKNGRILTLPRSNPS

SEQ ID NO: 950 - protein, 509 aa, Homo sapiens
MPSGFQQIGSEDGEPPQQRVTGTLVLAVFSAVLGSLQFGYNIGVINAPQKVIEQSYNETWLGRQGPEGPSSIPPGTLTTLWALSVAIFSVGGMISSFLIGIISQWLGRKRAMLVNNVLAVLGGSLMGLANAAASYEMLILGRFLIGAYSGLTSGLVPMYVGEIAPTHLRGALGTLNQLAIVIGILIAQVLGLESLLGTASLWPLLLGLTVLPALLQLVLLPFCPESPRYLYIIQNLEGPARKSLKRLTGWADVSGVLAELKDEKRKLERERPLSLLQLLGSRTHRQPLIIAVVLQLSQQLSGINAVFYYSTSIFETAGVGQPAYATIGAGVVNTVFTLVSVLLVERAGRRTLHLLGLAGMCGCAILMTVALLLLERVPAMSYVSIVAIFGFVAFFEIGPGPIPWFIVAELFSQGPRPAAMAVAGFSNWTSNFIIGMGFQYVAEAMGPYVFLLFAVLLLGFFIFTFLRVPETRGRTFDQISAAFHRTPSLLEQEVKPSTELEYLGPDEND

SEQ ID NO: 951 - protein, 8 aa, synthetic construct
  REGION 1..8: note = VH_CDR2_43
IYPGSNDA

SEQ ID NO: 952 - protein, 8 aa, synthetic construct
  REGION 1..8: note = VH_CDR2_44
IYPGSSDT

SEQ ID NO: 953 - protein, 13 aa, synthetic construct
  REGION 1..13: note = VH_CDR3_60
ANYFGASGWFFDV

SEQ ID NO: 954 - protein, 13 aa, synthetic construct
  REGION 1..13: note = VH_CDR3_61
ANYFGCSGWFFDV

SEQ ID NO: 955 - protein, 120 aa, synthetic construct
  REGION 1..120: note = VH-95 Peptide Sequence
QFQLQQSGPELVKPGASVKISCKASGYTFTDYYINWVKQRPGQGLEWIGWIYPGSQDTKYNEKFKGKATLTVDTSSSTAYMQLGSLTSEDSAVYFCANYFGASGWFFDVWGTGTTVTVSS

SEQ ID NO: 956 - protein, 120 aa, synthetic construct
  REGION 1..120: note = VH-96 Peptide Sequence
QFQLQQSGPELVKPGASVKISCKASGYTFTDYYINWVKQRPGQGLEWIGWIYPGSNDAKYNEKFKGKATLTVDTSSSTAYMQLGSLTSEDSAVYFCANYFGCSGWFFDVWGTGTTVTVSS

SEQ ID NO: 957 - protein, 120 aa, synthetic construct
  REGION 1..120: note = VH-97 Peptide Sequence
QFQLQQSGPELVKPGASVKISCKASGYTFTDYYINWVKQRPGQGLEWIGWIYPGSQDTKYNEKFKGKATLTVDTSSSTAYMQLGSLTSEDSAVYFCANYFGCSGWFFDVWGTGTTVTVSS

SEQ ID NO: 958 - protein, 120 aa, synthetic construct
  REGION 1..120: note = VH-98 Peptide Sequence
QFQLQQSGPELVKPGASVKISCKASGYTFTDYYINWVKQRPGQGLEWIGWIYPGSSDTKYNEKFKGKATLTVDTSSSTAYMQLGSLTSEDSAVYFCANYFGCSGWFFDVWGTGTTVTVSS

SEQ ID NO: 959 - protein, 120 aa, synthetic construct; identical to SEQ ID NO: 955
  REGION 1..120: note = VH-99 Peptide Sequence

SEQ ID NO: 960 - protein, 120 aa, synthetic construct
  REGION 1..120: note = VH-100 Peptide Sequence
QFQLQQSGPELVKPGASVKISCKASGYTFTDYYINWVKQRPGQGLEWIGWIYPGSQDTKYNEKFKGKATLTVDTSSSTAYMQLGSLTSEDSAVYFCANYFGSSGWFFDVWGTGTTVTVSS

SEQ ID NO: 961 - protein, 120 aa, synthetic construct
  REGION 1..120: note = VH-101 Peptide Sequence
QVQLVQSGAEVKKPGASVKVSCKASGYTFTDYYINWVRQAPGQGLEWMGWIYPGSQDTKYAQKFQGRVTMTVDTSISTAYMELSRLRSDDTAVYYCANYFGSSGWFFDVWGQGTMVTVSS

SEQ ID NO: 962 - protein, 120 aa, synthetic construct; identical to SEQ ID NO: 961
  REGION 1..120: note = VH-102 Peptide Sequence

SEQ ID NO: 963 - protein, 120 aa, synthetic construct; identical to SEQ ID NO: 961
  REGION 1..120: note = VH-103 Peptide Sequence

SEQ ID NO: 964 - protein, 120 aa, synthetic construct; identical to SEQ ID NO: 961
  REGION 1..120: note = VH-104 Peptide Sequence

SEQ ID NO: 965 - protein, 120 aa, synthetic construct
  REGION 1..120: note = VH-105 Peptide Sequence
QVQLVQSGAEVKKPGASVKVSCKASGYTFTDYYINWVRQAPGQGLEWMGWIYPGSQDTKYNEKFQGRVTLTVDTSISTAYMELSRLRSDDTAVYFCANYFGSSGWFFDVWGQGTMVTVSS

SEQ ID NO: 966 - protein, 120 aa, synthetic construct; identical to SEQ ID NO: 965
  REGION 1..120: note = VH-106 Peptide Sequence

SEQ ID NO: 967 - protein, 120 aa, synthetic construct; identical to SEQ ID NO: 965
  REGION 1..120: note = VH-107 Peptide Sequence

SEQ ID NO: 968 - protein, 120 aa, synthetic construct; identical to SEQ ID NO: 965
  REGION 1..120: note = VH-108 Peptide Sequence

SEQ ID NO: 969 - protein, 112 aa, synthetic construct; identical to SEQ ID NO: 383
  REGION 1..112: note = VL-93 Peptide Sequence

SEQ ID NO: 970 - protein, 112 aa, synthetic construct; identical to SEQ ID NO: 383
  REGION 1..112: note = VL-94 Peptide Sequence

SEQ ID NO: 971 - protein, 112 aa, synthetic construct; identical to SEQ ID NO: 383
  REGION 1..112: note = VL-95 Peptide Sequence

SEQ ID NO: 972 - protein, 112 aa, synthetic construct; identical to SEQ ID NO: 383
  REGION 1..112: note = VL-96 Peptide Sequence

SEQ ID NO: 973 - protein, 112 aa, synthetic construct; identical to SEQ ID NO: 383
  REGION 1..112: note = VL-97 Peptide Sequence

SEQ ID NO: 974 - protein, 112 aa, synthetic construct; identical to SEQ ID NO: 383
  REGION 1..112: note = VL-98 Peptide Sequence

SEQ ID NO: 975 - protein, 112 aa, synthetic construct; identical to SEQ ID NO: 821
  REGION 1..112: note = VL-99 Peptide Sequence

SEQ ID NO: 976 - protein, 112 aa, synthetic construct; identical to SEQ ID NO: 822
  REGION 1..112: note = VL-100 Peptide Sequence

SEQ ID NO: 977 - protein, 112 aa, synthetic construct; identical to SEQ ID NO: 823
  REGION 1..112: note = VL-101 Peptide Sequence

SEQ ID NO: 978 - protein, 112 aa, synthetic construct; identical to SEQ ID NO: 824
  REGION 1..112: note = VL-102 Peptide Sequence

SEQ ID NO: 979 - protein, 112 aa, synthetic construct; identical to SEQ ID NO: 821
  REGION 1..112: note = VL-103 Peptide Sequence

SEQ ID NO: 980 - protein, 112 aa, synthetic construct; identical to SEQ ID NO: 822
  REGION 1..112: note = VL-104 Peptide Sequence

SEQ ID NO: 981 - protein, 112 aa, synthetic construct; identical to SEQ ID NO: 823
  REGION 1..112: note = VL-105 Peptide Sequence

SEQ ID NO: 982 - protein, 112 aa, synthetic construct; identical to SEQ ID NO: 824
  REGION 1..112: note = VL-106 Peptide Sequence

SEQ ID NO: 983 - protein, 450 aa, synthetic construct
  REGION 1..450: note = 2D10.2B2-v2 heavy chain peptide sequence
QFQLQQSGPELVKPGASVKISCKASGYTFTDYYINWVKQRPGQGLEWIGWIYPGSQDTKYNEKFKGKATLTVDTSSSTAYMQLGSLTSEDSAVYFCANYFGASGWFFDVWGTGTTVTVSSAKTTPPSVYPLAPVCGDTTGSSVTLGCLVKGYFPEPVTLTWNSGSLSSGVHTFPAVLQSDLYTLSSSVTVTSSTWPSQSITCNVAHPASSTKVDKKIEPRGPTIKPCPPCKCPAPNAAGGPSVFIFPPKIKDVLMISLSPIVTCVVVDVSEDDPDVQISWFVNNVEVHTAQTQTHREDYNSTLRVVSALPIQHQDWMSGKEFKCKVNNKDLGAPIERTISKPKGSVRAPQVYVLPPPEEEMTKKQVTLTCMVTDFMPEDIYVEWTNNGKTELNYKNTEPVLDSDGSYFMYSKLRVEKKNWVERNSYSCSVVHEGLHNHHTTKSFSRTPGK

SEQ ID NO: 984 - protein, 446 aa, synthetic construct
  REGION 1..446: note = 2D10-VH0-NDA-VL0 heavy chain peptide sequence
QFQLQQSGPELVKPGASVKISCKASGYTFTDYYINWVKQRPGQGLEWIGWIYPGSNDAKYNEKFKGKATLTVDTSSSTAYMQLGSLTSEDSAVYFCANYFGCSGWFFDVWGTGTTVTVSSASTKGPSVFPLAPCSRSTSESTAALGCLVKDYFPEPVTVSWNSGALTSGVHTFPAVLQSSGLYSLSSVVTVPSSSLGTKTYTCNVDHKPSNTKVDKRVESKYGPPCPPCPAPEFLGGPSVFLFPPKPKDTLMISRTPEVTCVVVDVSQEDPEVQFNWYVDGVEVHNAKTKPREEQFNSTYRVVSVLTVLHQDWLNGKEYKCKVSNKGLPSSIEKTISKAKGQPREPQVYTLPPSQEEMTKNQVSLTCLVKGFYPSDIAVEWESNGQPENNYKTTPPVLDSDGSFFLYSRLTVDKSRWQEGNVFSCSVMHEALHNHYTQKSLSLSLG

SEQ ID NO: 985 - protein, 446 aa, synthetic construct
  REGION 1..446: note = 2D10-VH0-QDT-VL0 heavy chain peptide sequence
QFQLQQSGPELVKPGASVKISCKASGYTFTDYYINWVKQRPGQGLEWIGWIYPGSQDTKYNEKFKGKATLTVDTSSSTAYMQLGSLTSEDSAVYFCANYFGCSGWFFDVWGTGTTVTVSSASTKGPSVFPLAPCSRSTSESTAALGCLVKDYFPEPVTVSWNSGALTSGVHTFPAVLQSSGLYSLSSVVTVPSSSLGTKTYTCNVDHKPSNTKVDKRVESKYGPPCPPCPAPEFLGGPSVFLFPPKPKDTLMISRTPEVTCVVVDVSQEDPEVQFNWYVDGVEVHNAKTKPREEQFNSTYRVVSVLTVLHQDWLNGKEYKCKVSNKGLPSSIEKTISKAKGQPREPQVYTLPPSQEEMTKNQVSLTCLVKGFYPSDIAVEWESNGQPENNYKTTPPVLDSDGSFFLYSRLTVDKSRWQEGNVFSCSVMHEALHNHYTQKSLSLSLG

SEQ ID NO: 986 - protein, 446 aa, synthetic construct
  REGION 1..446: note = 2D10-VH0-SDT-VL0 heavy chain peptide sequence
QFQLQQSGPELVKPGASVKISCKASGYTFTDYYINWVKQRPGQGLEWIGWIYPGSSDTKYNEKFKGKATLTVDTSSSTAYMQLGSLTSEDSAVYFCANYFGCSGWFFDVWGTGTTVTVSSASTKGPSVFPLAPCSRSTSESTAALGCLVKDYFPEPVTVSWNSGALTSGVHTFPAVLQSSGLYSLSSVVTVPSSSLGTKTYTCNVDHKPSNTKVDKRVESKYGPPCPPCPAPEFLGGPSVFLFPPKPKDTLMISRTPEVTCVVVDVSQEDPEVQFNWYVDGVEVHNAKTKPREEQFNSTYRVVSVLTVLHQDWLNGKEYKCKVSNKGLPSSIEKTISKAKGQPREPQVYTLPPSQEEMTKNQVSLTCLVKGFYPSDIAVEWESNGQPENNYKTTPPVLDSDGSFFLYSRLTVDKSRWQEGNVFSCSVMHEALHNHYTQKSLSLSLG

SEQ ID NO: 987 - protein, 446 aa, synthetic construct
  REGION 1..446: note = 2D10-VH0-v1-QDT heavy chain peptide sequence
QFQLQQSGPELVKPGASVKISCKASGYTFTDYYINWVKQRPGQGLEWIGWIYPGSQDTKYNEKFKGKATLTVDTSSSTAYMQLGSLTSEDSAVYFCANYFGASGWFFDVWGTGTTVTVSSASTKGPSVFPLAPCSRSTSESTAALGCLVKDYFPEPVTVSWNSGALTSGVHTFPAVLQSSGLYSLSSVVTVPSSSLGTKTYTCNVDHKPSNTKVDKRVESKYGPPCPPCPAPEFLGGPSVFLFPPKPKDTLMISRTPEVTCVVVDVSQEDPEVQFNWYVDGVEVHNAKTKPREEQFNSTYRVVSVLTVLHQDWLNGKEYKCKVSNKGLPSSIEKTISKAKGQPREPQVYTLPPSQEEMTKNQVSLTCLVKGFYPSDIAVEWESNGQPENNYKTTPPVLDSDGSFFLYSRLTVDKSRWQEGNVFSCSVMHEALHNHYTQKSLSLSLG

SEQ ID NO: 988 - protein, 446 aa, synthetic construct
  REGION 1..446: note = 2D10-VH0-v2-QDT heavy chain peptide sequence
QFQLQQSGPELVKPGASVKISCKASGYTFTDYYINWVKQRPGQGLEWIGWIYPGSQDTKYNEKFKGKATLTVDTSSSTAYMQLGSLTSEDSAVYFCANYFGSSGWFFDVWGTGTTVTVSSASTKGPSVFPLAPCSRSTSESTAALGCLVKDYFPEPVTVSWNSGALTSGVHTFPAVLQSSGLYSLSSVVTVPSSSLGTKTYTCNVDHKPSNTKVDKRVESKYGPPCPPCPAPEFLGGPSVFLFPPKPKDTLMISRTPEVTCVVVDVSQEDPEVQFNWYVDGVEVHNAKTKPREEQFNSTYRVVSVLTVLHQDWLNGKEYKCKVSNKGLPSSIEKTISKAKGQPREPQVYTLPPSQEEMTKNQVSLTCLVKGFYPSDIAVEWESNGQPENNYKTTPPVLDSDGSFFLYSRLTVDKSRWQEGNVFSCSVMHEALHNHYTQKSLSLSLG

SEQ ID NO: 989 - protein, 446 aa, synthetic construct
  REGION 1..446: note = 2D10-hVH1-hVL1 heavy chain peptide sequence
QVQLVQSGAEVKKPGASVKVSCKASGYTFTDYYINWVRQAPGQGLEWMGWIYPGSQDTKYAQKFQGRVTMTVDTSISTAYMELSRLRSDDTAVYYCANYFGSSGWFFDVWGQGTMVTVSSASTKGPSVFPLAPCSRSTSESTAALGCLVKDYFPEPVTVSWNSGALTSGVHTFPAVLQSSGLYSLSSVVTVPSSSLGTKTYTCNVDHKPSNTKVDKRVESKYGPPCPPCPAPEFLGGPSVFLFPPKPKDTLMISRTPEVTCVVVDVSQEDPEVQFNWYVDGVEVHNAKTKPREEQFNSTYRVVSVLTVLHQDWLNGKEYKCKVSNKGLPSSIEKTISKAKGQPREPQVYTLPPSQEEMTKNQVSLTCLVKGFYPSDIAVEWESNGQPENNYKTTPPVLDSDGSFFLYSRLTVDKSRWQEGNVFSCSVMHEALHNHYTQKSLSLSLG

SEQ ID NO: 990 - protein, 446 aa, synthetic construct; identical to SEQ ID NO: 989
  REGION 1..446: note = 2D10-hVH1-hVL2 heavy chain peptide sequence

SEQ ID NO: 991 - protein, 446 aa, synthetic construct; identical to SEQ ID NO: 989
  REGION 1..446: note = 2D10-hVH1-hVL3 heavy chain peptide sequence

SEQ ID NO: 992 - protein, 446 aa, synthetic construct; identical to SEQ ID NO: 989
  REGION 1..446: note = 2D10-hVH1-hVL4 heavy chain peptide sequence

SEQ ID NO: 993 - protein, 446 aa, synthetic construct
  REGION 1..446: note = 2D10-hVH2-hVL1 heavy chain peptide sequence
QVQLVQSGAEVKKPGASVKVSCKASGYTFTDYYINWVRQAPGQGLEWMGWIYPGSQDTKYNEKFQGRVTLTVDTSISTAYMELSRLRSDDTAVYFCANYFGSSGWFFDVWGQGTMVTVSSASTKGPSVFPLAPCSRSTSESTAALGCLVKDYFPEPVTVSWNSGALTSGVHTFPAVLQSSGLYSLSSVVTVPSSSLGTKTYTCNVDHKPSNTKVDKRVESKYGPPCPPCPAPEFLGGPSVFLFPPKPKDTLMISRTPEVTCVVVDVSQEDPEVQFNWYVDGVEVHNAKTKPREEQFNSTYRVVSVLTVLHQDWLNGKEYKCKVSNKGLPSSIEKTISKAKGQPREPQVYTLPPSQEEMTKNQVSLTCLVKGFYPSDIAVEWESNGQPENNYKTTPPVLDSDGSFFLYSRLTVDKSRWQEGNVFSCSVMHEALHNHYTQKSLSLSLG

SEQ ID NO: 994 - protein, 446 aa, synthetic construct; identical to SEQ ID NO: 993
  REGION 1..446: note = 2D10-hVH2-hVL2 heavy chain peptide sequence

SEQ ID NO: 995 - protein, 446 aa, synthetic construct; identical to SEQ ID NO: 993
  REGION 1..446: note = 2D10-hVH2-hVL3 heavy chain peptide sequence

SEQ ID NO: 996 - protein, 446 aa, synthetic construct; identical to SEQ ID NO: 993
  REGION 1..446: note = 2D10-hVH2-hVL4 heavy chain peptide sequence

SEQ ID NO: 997 - protein, 219 aa, synthetic construct; identical to SEQ ID NO: 504
  REGION 1..219: note = 2D10.2B2-v2 light chain peptide sequence

SEQ ID NO: 998 - protein, 219 aa, synthetic construct; identical to SEQ ID NO: 805
  REGION 1..219: note = 2D10-VH0-NDA-VL0 light chain peptide sequence

SEQ ID NO: 999 - protein, 219 aa, synthetic construct; identical to SEQ ID NO: 805
  REGION 1..219: note = 2D10-VH0-QDT-VL0 light chain peptide sequence

SEQ ID NO: 1000 - protein, 219 aa, synthetic construct; identical to SEQ ID NO: 805
  REGION 1..219: note = 2D10-VH0-SDT-VL0 light chain peptide sequence

SEQ ID NO: 1001 - protein, 219 aa, synthetic construct; identical to SEQ ID NO: 805
  REGION 1..219: note = 2D10-VH0-v1-QDT light chain peptide sequence

SEQ ID NO: 1002 - protein, 219 aa, synthetic construct; identical to SEQ ID NO: 805
  REGION 1..219: note = 2D10-VH0-v2-QDT light chain peptide sequence

SEQ ID NO: 1003 - protein, 219 aa, synthetic construct; identical to SEQ ID NO: 851
  REGION 1..219: note = 2D10-hVH1-hVL1 light chain peptide sequence

SEQ ID NO: 1004 - protein, 219 aa, synthetic construct; identical to SEQ ID NO: 852
  REGION 1..219: note = 2D10-hVH1-hVL2 light chain peptide sequence

SEQ ID NO: 1005 - protein, 219 aa, synthetic construct; identical to SEQ ID NO: 853
  REGION 1..219: note = 2D10-hVH1-hVL3 light chain peptide sequence

SEQ ID NO: 1006 - protein, 219 aa, synthetic construct; identical to SEQ ID NO: 854
  REGION 1..219: note = 2D10-hVH1-hVL4 light chain peptide sequence

SEQ ID NO: 1007 - protein, 219 aa, synthetic construct; identical to SEQ ID NO: 851
  REGION 1..219: note = 2D10-hVH2-hVL1 light chain peptide sequence

SEQ ID NO: 1008 - protein, 219 aa, synthetic construct; identical to SEQ ID NO: 852
  REGION 1..219: note = 2D10-hVH2-hVL2 light chain peptide sequence

SEQ ID NO: 1009 - protein, 219 aa, synthetic construct; identical to SEQ ID NO: 853
  REGION 1..219: note = 2D10-hVH2-hVL3 light chain peptide sequence

SEQ ID NO: 1010 - protein, 219 aa, synthetic construct; identical to SEQ ID NO: 854
  REGION 1..219: note = 2D10-hVH2-hVL4 light chain peptide sequence

SEQ ID NO: 1011 - DNA, 360 bp, synthetic construct
  misc_feature 1..360: note = 2D10.2B2-v2 VH DNA sequence
  source 1..360: mol_type = other DNA
cagtttcagcttcaacagtctggtcctgaactcgtaaagcctggagccagtgtaaaaatatcctgtaaggcatcaggatacactttcaccgattactacatcaactgggtaaagcagcgacctggtcagggactggagtggattggctggatctaccccggatcacaagacaccaaatacaatgagaagttcaagggcaaagctacccttacagtcgatacctcctcctccaccgcatatatgcaacttgggtcactgacttcagaggattctgcagtctatttttgcgctaattactttggagccagcggctggtttttcgacgtgtggggaaccggaaccacagtgacagtatcctct

SEQ ID NO: 1012 - DNA, 360 bp, synthetic construct
  misc_feature 1..360: note = 2D10-VH0-NDA-VL0 VH DNA sequence
  source 1..360: mol_type = other DNA
cagtttcagcttcaacagtctggtcctgaactcgtaaagcctggagccagtgtaaaaatatcctgtaaggcatcaggatacactttcaccgattactacatcaactgggtaaagcagcgacctggtcagggactggagtggattggctggatctaccccggatcaaatgacgccaaatacaatgagaagttcaagggcaaagctacccttacagtcgatacctcctcctccaccgcatatatgcaacttgggtcactgacttcagaggattctgcagtctatttttgcgctaattactttggatgcagcggctggtttttcgacgtgtggggaaccggaaccacagtgacagtatcctct

SEQ ID NO: 1013 - DNA, 360 bp, synthetic construct
  misc_feature 1..360: note = 2D10-VH0-QDT-VL0 VH DNA sequence
  source 1..360: mol_type = other DNA
cagtttcagcttcaacagtctggtcctgaactcgtaaagcctggagccagtgtaaaaatatcctgtaaggcatcaggatacactttcaccgattactacatcaactgggtaaagcagcgacctggtcagggactggagtggattggctggatctaccccggatcacaagacaccaaatacaatgagaagttcaagggcaaagctacccttacagtcgatacctcctcctccaccgcatatatgcaacttgggtcactgacttcagaggattctgcagtctatttttgcgctaattactttggatgcagcggctggtttttcgacgtgtggggaaccggaaccacagtgacagtatcctct

SEQ ID NO: 1014 - DNA, 360 bp, synthetic construct
  misc_feature 1..360: note = 2D10-VH0-SDT-VL0 VH DNA sequence
  source 1..360: mol_type = other DNA
cagtttcagcttcaacagtctggtcctgaactcgtaaagcctggagccagtgtaaaaatatcctgtaaggcatcaggatacactttcaccgattactacatcaactgggtaaagcagcgacctggtcagggactggagtggattggctggatctaccccggatcatccgacaccaaatacaatgagaagttcaagggcaaagctacccttacagtcgatacctcctcctccaccgcatatatgcaacttgggtcactgacttcagaggattctgcagtctatttttgcgctaattactttggatgcagcggctggtttttcgacgtgtggggaaccggaaccacagtgacagtatcctct

SEQ ID NO: 1015 - DNA, 360 bp, synthetic construct; identical to SEQ ID NO: 1011
  misc_feature 1..360: note = 2D10-VH0-v1-QDT VH DNA sequence
  source 1..360: mol_type = other DNA

SEQ ID NO: 1016 - DNA, 360 bp, synthetic construct
  misc_feature 1..360: note = 2D10-VH0-v2-QDT VH DNA sequence
  source 1..360: mol_type = other DNA
cagtttcagcttcaacagtctggtcctgaactcgtaaagcctggagccagtgtaaaaatatcctgtaaggcatcaggatacactttcaccgattactacatcaactgggtaaagcagcgacctggtcagggactggagtggattggctggatctaccccggatcacaagacaccaaatacaatgagaagttcaagggcaaagctacccttacagtcgatacctcctcctccaccgcatatatgcaacttgggtcactgacttcagaggattctgcagtctatttttgcgctaattactttggatctagcggctggtttttcgacgtgtggggaaccggaaccacagtgacagtatcctct

SEQ ID NO: 1017 - DNA, 360 bp, synthetic construct
  misc_feature 1..360: note = 2D10-hVH1-hVL1 VH DNA sequence
  source 1..360: mol_type = other DNA
caggtacaactcgtgcagtcaggggctgaagtgaagaaacctggggctagtgttaaggtaagctgcaaggctagcggatacacattcacggattactatatcaattgggtgcggcaggctcctggacagggactcgaatggatgggttggatctaccctggatcccaggataccaagtatgcacagaaatttcagggccgcgtcacgatgacagttgacacatccatatcaacagcctacatggaactcagtagattgcggtctgacgacaccgccgtttactattgtgcgaactattttggatcaagcgggtggttctttgacgtttggggccagggtactatggtcacagtgagctct

SEQ ID NO: 1018 - DNA, 360 bp, synthetic construct; identical to SEQ ID NO: 1017
  misc_feature 1..360: note = 2D10-hVH1-hVL2 VH DNA sequence
  source 1..360: mol_type = other DNA

SEQ ID NO: 1019 - DNA, 360 bp, synthetic construct; identical to SEQ ID NO: 1017
  misc_feature 1..360: note = 2D10-hVH1-hVL3 VH DNA sequence
  source 1..360: mol_type = other DNA

SEQ ID NO: 1020 - DNA, 360 bp, synthetic construct; identical to SEQ ID NO: 1017
  misc_feature 1..360: note = 2D10-hVH1-hVL4 VH DNA sequence
  source 1..360: mol_type = other DNA

SEQ ID NO: 1021 - DNA, 360 bp, synthetic construct
  misc_feature 1..360: note = 2D10-hVH2-hVL1 VH DNA sequence
  source 1..360: mol_type = other DNA
caagtccagctggtccagtccggcgctgaagtgaaaaaacccggagcttcagttaaggtgagctgcaaggcttctggctatacattcactgattactatatcaattgggtacgtcaggcacctggccaaggcctcgagtggatggggtggatctatccagggtcccaggacacaaaatataatgaaaaatttcagggacgggtgaccctgacagtggacacctctattagcacggcctatatggagctgtccaggcttaggtctgatgacacagccgtctacttttgtgctaactatttcggctccagcggctggttctttgatgtctggggacaagggacaatggtgaccgtctcctca

SEQ ID NO: 1022 - DNA, 360 bp, synthetic construct; identical to SEQ ID NO: 1021
  misc_feature 1..360: note = 2D10-hVH2-hVL2 VH DNA sequence
  source 1..360: mol_type = other DNA

SEQ ID NO: 1023 - DNA, 360 bp, synthetic construct; identical to SEQ ID NO: 1021
  misc_feature 1..360: note = 2D10-hVH2-hVL3 VH DNA sequence
  source 1..360: mol_type = other DNA

SEQ ID NO: 1024 - DNA, 360 bp, synthetic construct; identical to SEQ ID NO: 1021
  misc_feature 1..360: note = 2D10-hVH2-hVL4 VH DNA sequence
  source 1..360: mol_type = other DNA

SEQ ID NO: 1025 - DNA, 336 bp, synthetic construct; identical to SEQ ID NO: 631
  misc_feature 1..336: note = 2D10.2B2-v2 VL DNA sequence
  source 1..336: mol_type = other DNA

SEQ ID NO: 1026 - DNA, 336 bp, synthetic construct; identical to SEQ ID NO: 631
  misc_feature 1..336: note = 2D10-VH0-NDA-VL0 VL DNA sequence
  source 1..336: mol_type = other DNA

SEQ ID NO: 1027 - DNA, 336 bp, synthetic construct; identical to SEQ ID NO: 631
  misc_feature 1..336: note = 2D10-VH0-QDT-VL0 VL DNA sequence
  source 1..336: mol_type = other DNA

SEQ ID NO: 1028 - DNA, 336 bp, synthetic construct; identical to SEQ ID NO: 631
  misc_feature 1..336: note = 2D10-VH0-SDT-VL0 VL DNA sequence
  source 1..336: mol_type = other DNA

SEQ ID NO: 1029 - DNA, 336 bp, synthetic construct; identical to SEQ ID NO: 631
  misc_feature 1..336: note = 2D10-VH0-v1-QDT VL DNA sequence
  source 1..336: mol_type = other DNA

SEQ ID NO: 1030 - DNA, 336 bp, synthetic construct; identical to SEQ ID NO: 631
  misc_feature 1..336: note = 2D10-VH0-v2-QDT VL DNA sequence
  source 1..336: mol_type = other DNA

SEQ ID NO: 1031 - DNA, 336 bp, synthetic construct; identical to SEQ ID NO: 881
  misc_feature 1..336: note = 2D10-hVH1-hVL1 VL DNA sequence
  source 1..336: mol_type = other DNA

SEQ ID NO: 1032 - DNA, 336 bp, synthetic construct; identical to SEQ ID NO: 882
  misc_feature 1..336: note = 2D10-hVH1-hVL2 VL DNA sequence
  source 1..336: mol_type = other DNA

SEQ ID NO: 1033 - DNA, 336 bp, synthetic construct; identical to SEQ ID NO: 883
  misc_feature 1..336: note = 2D10-hVH1-hVL3 VL DNA sequence
  source 1..336: mol_type = other DNA

SEQ ID NO: 1034 - DNA, 336 bp, synthetic construct; identical to SEQ ID NO: 884
  misc_feature 1..336: note = 2D10-hVH1-hVL4 VL DNA sequence
  source 1..336: mol_type = other DNA

SEQ ID NO: 1035 - DNA, 336 bp, synthetic construct; identical to SEQ ID NO: 881
  misc_feature 1..336: note = 2D10-hVH2-hVL1 VL DNA sequence
  source 1..336: mol_type = other DNA

SEQ ID NO: 1036 - DNA, 336 bp, synthetic construct; identical to SEQ ID NO: 882
  misc_feature 1..336: note = 2D10-hVH2-hVL2 VL DNA sequence
  source 1..336: mol_type = other DNA

SEQ ID NO: 1037 - DNA, 336 bp, synthetic construct; identical to SEQ ID NO: 883
  misc_feature 1..336: note = 2D10-hVH2-hVL3 VL DNA sequence
  source 1..336: mol_type = other DNA

SEQ ID NO: 1038 - DNA, 336 bp, synthetic construct; identical to SEQ ID NO: 884
  misc_feature 1..336: note = 2D10-hVH2-hVL4 VL DNA sequence
  source 1..336: mol_type = other DNA

SEQ ID NO: 1039 - DNA, 1356 bp, synthetic construct
  misc_feature 1..1356: note = 2D10.2B2-v2 heavy chain DNA sequence
  source 1..1356: mol_type = other DNA
cagtttcagcttcaacagtctggtcctgaactcgtaaagcctggagccagtgtaaaaatatcctgtaaggcatcaggatacactttcaccgattactacatcaactgggtaaagcagcgacctggtcagggactggagtggattggctggatctaccccggatcacaagacaccaaatacaatgagaagttcaagggcaaagctacccttacagtcgatacctcctcctccaccgcatatatgcaacttgggtcactgacttcagaggattctgcagtctatttttgcgctaattactttggagccagcggctggtttttcgacgtgtggggaaccggaaccacagtgacagtatcctctgctaagactactcctcccagtgtctaccccctggcccccgtgtgcggcgacacaacaggctcctccgtgacactgggctgcctggtgaaaggctacttccccgagcccgtgacactgacatggaactccggctccctgtcctccggcgtgcacacattccccgccgtgctgcagtccgacctgtacacactgtcctcctccgtgacagtgacatcctccacatggccctcccagtccatcacatgcaacgtggcccaccccgcctcctccacaaaagtggacaaaaaaatcgagcccaggggccccacaatcaaaccctgccccccctgcaaatgccccgcccccaacgccgccggcggcccctccgtgttcatcttcccccccaaaatcaaagacgtgctgatgatctccctgtcccccatcgtgacatgcgtggtggtggacgtgtccgaggacgaccccgacgtgcagatctcctggttcgtgaacaacgtggaggtgcacacagcccagacacagacacacagggaggactacaactccacactgagggtggtgtccgccctgcccatccagcaccaggactggatgtccggcaaagagttcaaatgcaaagtgaacaacaaagacctgggcgcccccatcgagaggacaatctccaaacccaaaggctccgtgagggccccccaggtgtacgtgctgcccccccccgaggaggagatgacaaaaaaacaggtgacactgacatgcatggtgacagacttcatgcccgaggacatctacgtggagtggacaaacaacggcaaaacagagctgaactacaaaaacacagagcccgtgctggactccgacggctcctacttcatgtactccaaactgagggtggagaaaaaaaactgggtggagaggaactcctactcctgctccgtggtgcacgagggcctgcacaaccaccacacaacaaaatccttctccaggacacccggcaaatagtaa

SEQ ID NO: 1040 - DNA, 1344 bp, synthetic construct
  misc_feature 1..1344: note = 2D10-VH0-NDA-VL0 heavy chain DNA sequence
  source 1..1344: mol_type = other DNA
cagtttcagcttcaacagtctggtcctgaactcgtaaagcctggagccagtgtaaaaatatcctgtaaggcatcaggatacactttcaccgattactacatcaactgggtaaagcagcgacctggtcagggactggagtggattggctggatctaccccggatcaaatgacgccaaatacaatgagaagttcaagggcaaagctacccttacagtcgatacctcctcctccaccgcatatatgcaacttgggtcactgacttcagaggattctgcagtctatttttgcgctaattactttggatgcagcggctggtttttcgacgtgtggggaaccggaaccacagtgacagtatcctctgctagcaccaagggccccagcgtgtttcctctcgctccctgcagccggagcacatccgagagcaccgctgctctgggctgtctcgtgaaggactacttccctgaacccgtcaccgtcagctggaatagcggcgccctgacatccggcgtccacacattccccgctgtcctgcagagcagcggcctgtacagcctgagctccgtggtcaccgtgcctagcagcagcctgggaacaaagacctacacctgcaacgtggaccataagccctccaacaccaaggtggacaagcgggtggaatccaagtatggacccccctgtcctccttgccctgctcctgaatttctcggaggcccctccgtcttcctgtttccccccaagcccaaggacaccctgatgatctcccggacacccgaagtcacctgcgtcgtggtggatgtcagccaggaagatcccgaggtgcagttcaactggtacgtggacggagtggaggtgcataacgccaaaaccaagcccagggaagagcagttcaacagcacctatcgggtcgtgtccgtgctcaccgtcctgcatcaggattggctcaacggcaaggagtacaagtgcaaggtgtccaacaagggcctgccctcctccatcgagaagaccatctccaaggctaagggccaacctcgggagccccaagtgtataccctccctcccagccaggaggagatgaccaagaatcaagtgagcctgacctgcctcgtgaagggattttacccctccgacatcgctgtggaatgggaaagcaatggccaacctgagaacaactacaagaccacaccccccgtgctggactccgatggctccttcttcctgtacagcaggctgaccgtggacaaatcccggtggcaagagggaaacgtgttcagctgctccgtgatgcacgaggctctccacaaccactacacccagaagagcctctccctgagcctcggctagtaa

SEQ ID NO: 1041 - DNA, 1344 bp, synthetic construct
  misc_feature 1..1344: note = 2D10-VH0-QDT-VL0 heavy chain DNA sequence
  source 1..1344: mol_type = other DNA
cagtttcagcttcaacagtctggtcctgaactcgtaaagcctggagccagtgtaaaaatatcctgtaaggcatcaggatacactttcaccgattactacatcaactgggtaaagcagcgacctggtcagggactggagtggattggctggatctaccccggatcacaagacaccaaatacaatgagaagttcaagggcaaagctacccttacagtcgatacctcctcctccaccgcatatatgcaacttgggtcactgacttcagaggattctgcagtctatttttgcgctaattactttggatgcagcggctggtttttcgacgtgtggggaaccggaaccacagtgacagtatcctctgctagcaccaagggccccagcgtgtttcctctcgctccctgcagccggagcacatccgagagcaccgctgctctgggctgtctcgtgaaggactacttccctgaacccgtcaccgtcagctggaatagcggcgccctgacatccggcgtccacacattccccgctgtcctgcagagcagcggcctgtacagcctgagctccgtggtcaccgtgcctagcagcagcctgggaacaaagacctacacctgcaacgtggaccataagccctccaacaccaaggtggacaagcgggtggaatccaagtatggacccccctgtcctccttgccctgctcctgaatttctcggaggcccctccgtcttcctgtttccccccaagcccaaggacaccctgatgatctcccggacacccgaagtcacctgcgtcgtggtggatgtcagccaggaagatcccgaggtgcagttcaactggtacgtggacggagtggaggtgcataacgccaaaaccaagcccagggaagagcagttcaacagcacctatcgggtcgtgtccgtgctcaccgtcctgcatcaggattggctcaacggcaaggagtacaagtgcaaggtgtccaacaagggcctgccctcctccatcgagaagaccatctccaaggctaagggccaacctcgggagccccaagtgtataccctccctcccagccaggaggagatgaccaagaatcaagtgagcctgacctgcctcgtgaagggattttacccctccgacatcgctgtggaatgggaaagcaatggccaacctgagaacaactacaagaccacaccccccgtgctggactccgatggctccttcttcctgtacagcaggctgaccgtggacaaatcccggtggcaagagggaaacgtgttcagctgctccgtgatgcacgaggctctccacaaccactacacccagaagagcctctccctgagcctcggctagtaa

SEQ ID NO: 1042 - DNA, 1344 bp, synthetic construct
  misc_feature 1..1344: note = 2D10-VH0-SDT-VL0 heavy chain DNA sequence
  source 1..1344: mol_type = other DNA
cagtttcagcttcaacagtctggtcctgaactcgtaaagcctggagccagtgtaaaaatatcctgtaaggcatcaggatacactttcaccgattactacatcaactgggtaaagcagcgacctggtcagggactggagtggattggctggatctaccccggatcatccgacaccaaatacaatgagaagttcaagggcaaagctacccttacagtcgatacctcctcctccaccgcatatatgcaacttgggtcactgacttcagaggattctgcagtctatttttgcgctaattactttggatgcagcggctggtttttcgacgtgtggggaaccggaaccacagtgacagtatcctctgctagcaccaagggccccagcgtgtttcctctcgctccctgcagccggagcacatccgagagcaccgctgctctgggctgtctcgtgaaggactacttccctgaacccgtcaccgtcagctggaatagcggcgccctgacatccggcgtccacacattccccgctgtcctgcagagcagcggcctgtacagcctgagctccgtggtcaccgtgcctagcagcagcctgggaacaaagacctacacctgcaacgtggaccataagccctccaacaccaaggtggacaagcgggtggaatccaagtatggacccccctgtcctccttgccctgctcctgaatttctcggaggcccctccgtcttcctgtttccccccaagcccaaggacaccctgatgatctcccggacacccgaagtcacctgcgtcgtggtggatgtcagccaggaagatcccgaggtgcagttcaactggtacgtggacggagtggaggtgcataacgccaaaaccaagcccagggaagagcagttcaacagcacctatcgggtcgtgtccgtgctcaccgtcctgcatcaggattggctcaacggcaaggagtacaagtgcaaggtgtccaacaagggcctgccctcctccatcgagaagaccatctccaaggctaagggccaacctcgggagccccaagtgtataccctccctcccagccaggaggagatgaccaagaatcaagtgagcctgacctgcctcgtgaagggattttacccctccgacatcgctgtggaatgggaaagcaatggccaacctgagaacaactacaagaccacaccccccgtgctggactccgatggctccttcttcctgtacagcaggctgaccgtggacaaatcccggtggcaagagggaaacgtgttcagctgctccgtgatgcacgaggctctccacaaccactacacccagaagagcctctccctgagcctcggctagtaa

SEQ ID NO: 1043 - DNA, 1344 bp, synthetic construct
  misc_feature 1..1344: note = 2D10-VH0-v1-QDT heavy chain DNA sequence
  source 1..1344: mol_type = other DNA
cagtttcagcttcaacagtctggtcctgaactcgtaaagcctggagccagtgtaaaaatatcctgtaaggcatcaggatacactttcaccgattactacatcaactgggtaaagcagcgacctggtcagggactggagtggattggctggatctaccccggatcacaagacaccaaatacaatgagaagttcaagggcaaagctacccttacagtcgatacctcctcctccaccgcatatatgcaacttgggtcactgacttcagaggattctgcagtctatttttgcgctaattactttggagccagcggctggtttttcgacgtgtggggaaccggaaccacagtgacagtatcctctgctagcaccaagggccccagcgtgtttcctctcgctccctgcagccggagcacatccgagagcaccgctgctctgggctgtctcgtgaaggactacttccctgaacccgtcaccgtcagctggaatagcggcgccctgacatccggcgtccacacattccccgctgtcctgcagagcagcggcctgtacagcctgagctccgtggtcaccgtgcctagcagcagcctgggaacaaagacctacacctgcaacgtggaccataagccctccaacaccaaggtggacaagcgggtggaatccaagtatggacccccctgtcctccttgccctgctcctgaatttctcggaggcccctccgtcttcctgtttccccccaagcccaaggacaccctgatgatctcccggacacccgaagtcacctgcgtcgtggtggatgtcagccaggaagatcccgaggtgcagttcaactggtacgtggacggagtggaggtgcataacgccaaaaccaagcccagggaagagcagttcaacagcacctatcgggtcgtgtccgtgctcaccgtcctgcatcaggattggctcaacggcaaggagtacaagtgcaaggtgtccaacaagggcctgccctcctccatcgagaagaccatctccaaggctaagggccaacctcgggagccccaagtgtataccctccctcccagccaggaggagatgaccaagaatcaagtgagcctgacctgcctcgtgaagggattttacccctccgacatcgctgtggaatgggaaagcaatggccaacctgagaacaactacaagaccacaccccccgtgctggactccgatggctccttcttcctgtacagcaggctgaccgtggacaaatcccggtggcaagagggaaacgtgttcagctgctccgtgatgcacgaggctctccacaaccactacacccagaagagcctctccctgagcctcggctagtaa

SEQ ID NO: 1044 - DNA, 1344 bp, synthetic construct
  misc_feature 1..1344: note = 2D10-VH0-v2-QDT heavy chain DNA sequence
  source 1..1344: mol_type = other DNA
cagtttcagcttcaacagtctggtcctgaactcgtaaagcctggagccagtgtaaaaatatcctgtaaggcatcaggatacactttcaccgattactacatcaactgggtaaagcagcgacctggtcagggactggagtggattggctggatctaccccggatcacaagacaccaaatacaatgagaagttcaagggcaaagctacccttacagtcgatacctcctcctccaccgcatatatgcaacttgggtcactgacttcagaggattctgcagtctatttttgcgctaattactttggatctagcggctggtttttcgacgtgtggggaaccggaaccacagtgacagtatcctctgctagcaccaagggccccagcgtgtttcctctcgctccctgcagccggagcacatccgagagcaccgctgctctgggctgtctcgtgaaggactacttccctgaacccgtcaccgtcagctggaatagcggcgccctgacatccggcgtccacacattccccgctgtcctgcagagcagcggcctgtacagcctgagctccgtggtcaccgtgcctagcagcagcctgggaacaaagacctacacctgcaacgtggaccataagccctccaacaccaaggtggacaagcgggtggaatccaagtatggacccccctgtcctccttgccctgctcctgaatttctcggaggcccctccgtcttcctgtttccccccaagcccaaggacaccctgatgatctcccggacacccgaagtcacctgcgtcgtggtggatgtcagccaggaagatcccgaggtgcagttcaactggtacgtggacggagtggaggtgcataacgccaaaaccaagcccagggaagagcagttcaacagcacctatcgggtcgtgtccgtgctcaccgtcctgcatcaggattggctcaacggcaaggagtacaagtgcaaggtgtccaacaagggcctgccctcctccatcgagaagaccatctccaaggctaagggccaacctcgggagccccaagtgtataccctccctcccagccaggaggagatgaccaagaatcaagtgagcctgacctgcctcgtgaagggattttacccctccgacatcgctgtggaatgggaaagcaatggccaacctgagaacaactacaagaccacaccccccgtgctggactccgatggctccttcttcctgtacagcaggctgaccgtggacaaatcccggtggcaagagggaaacgtgttcagctgctccgtgatgcacgaggctctccacaaccactacacccagaagagcctctccctgagcctcggctagtaa

SEQ ID NO: 1045 - DNA, 1344 bp, synthetic construct
  misc_feature 1..1344: note = 2D10-hVH1-hVL1 heavy chain DNA sequence
  source 1..1344: mol_type = other DNA
caggtacaactcgtgcagtcaggggctgaagtgaagaaacctggggctagtgttaaggtaagctgcaaggctagcggatacacattcacggattactatatcaattgggtgcggcaggctcctggacagggactcgaatggatgggttggatctaccctggatcccaggataccaagtatgcacagaaatttcagggccgcgtcacgatgacagttgacacatccatatcaacagcctacatggaactcagtagattgcggtctgacgacaccgccgtttactattgtgcgaactattttggatcaagcgggtggttctttgacgtttggggccagggtactatggtcacagtgagctctgctagcaccaagggccccagcgtgtttcctctcgctccctgcagccggagcacatccgagagcaccgctgctctgggctgtctcgtgaaggactacttccctgaacccgtcaccgtcagctggaatagcggcgccctgacatccggcgtccacacattccccgctgtcctgcagagcagcggcctgtacagcctgagctccgtggtcaccgtgcctagcagcagcctgggaacaaagacctacacctgcaacgtggaccataagccctccaacaccaaggtggacaagcgggtggaatccaagtatggacccccctgtcctccttgccctgctcctgaatttctcggaggcccctccgtcttcctgtttccccccaagcccaaggacaccctgatgatctcccggacacccgaagtcacctgcgtcgtggtggatgtcagccaggaagatcccgaggtgcagttcaactggtacgtggacggagtggaggtgcataacgccaaaaccaagcccagggaagagcagttcaacagcacctatcgggtcgtgtccgtgctcaccgtcctgcatcaggattggctcaacggcaaggagtacaagtgcaaggtgtccaacaagggcctgccctcctccatcgagaagaccatctccaaggctaagggccaacctcgggagccccaagtgtataccctccctcccagccaggaggagatgaccaagaatcaagtgagcctgacctgcctcgtgaagggattttacccctccgacatcgctgtggaatgggaaagcaatggccaacctgagaacaactacaagaccacaccccccgtgctggactccgatggctccttcttcctgtacagcaggctgaccgtggacaaatcccggtggcaagagggaaacgtgttcagctgctccgtgatgcacgaggctctccacaaccactacacccagaagagcctctccctgagcctcggctagtaa

SEQ ID NO: 1046 - DNA, 1344 bp, synthetic construct; identical to SEQ ID NO: 1045
  misc_feature 1..1344: note = 2D10-hVH1-hVL2 heavy chain DNA sequence
  source 1..1344: mol_type = other DNA

SEQ ID NO: 1047 - DNA, 1344 bp, synthetic construct; identical to SEQ ID NO: 1045
  misc_feature 1..1344: note = 2D10-hVH1-hVL3 heavy chain DNA sequence
  source 1..1344: mol_type = other DNA

SEQ ID NO: 1048 - DNA, 1344 bp, synthetic construct; identical to SEQ ID NO: 1045
  misc_feature 1..1344: note = 2D10-hVH1-hVL4 heavy chain DNA sequence
  source 1..1344: mol_type = other DNA

SEQ ID NO: 1049 - DNA, 1344 bp, synthetic construct
  misc_feature 1..1344: note = 2D10-hVH2-hVL1 heavy chain DNA sequence
  source 1..1344: mol_type = other DNA
caagtccagctggtccagtccggcgctgaagtgaaaaaacccggagcttcagttaaggtgagctgcaaggcttctggctatacattcactgattactatatcaattgggtacgtcaggcacctggccaaggcctcgagtggatggggtggatctatccagggtcccaggacacaaaatataatgaaaaatttcagggacgggtgaccctgacagtggacacctctattagcacggcctatatggagctgtccaggcttaggtctgatgacacagccgtctacttttgtgctaactatttcggctccagcggctggttctttgatgtctggggacaagggacaatggtgaccgtctcctcagctagcaccaagggccccagcgtgtttcctctcgctccctgcagccggagcacatccgagagcaccgctgctctgggctgtctcgtgaaggactacttccctgaacccgtcaccgtcagctggaatagcggcgccctgacatccggcgtccacacattccccgctgtcctgcagagcagcggcctgtacagcctgagctccgtggtcaccgtgcctagcagcagcctgggaacaaagacctacacctgcaacgtggaccataagccctccaacaccaaggtggacaagcgggtggaatccaagtatggacccccctgtcctccttgccctgctcctgaatttctcggaggcccctccgtcttcctgtttccccccaagcccaaggacaccctgatgatctcccggacacccgaagtcacctgcgtcgtggtggatgtcagccaggaagatcccgaggtgcagttcaactggtacgtggacggagtggaggtgcataacgccaaaaccaagcccagggaagagcagttcaacagcacctatcgggtcgtgtccgtgctcaccgtcctgcatcaggattggctcaacggcaaggagtacaagtgcaaggtgtccaacaagggcctgccctcctccatcgagaagaccatctccaaggctaagggccaacctcgggagccccaagtgtataccctccctcccagccaggaggagatgaccaagaatcaagtgagcctgacctgcctcgtgaagggattttacccctccgacatcgctgtggaatgggaaagcaatggccaacctgagaacaactacaagaccacaccccccgtgctggactccgatggctccttcttcctgtacagcaggctgaccgtggacaaatcccggtggcaagagggaaacgtgttcagctgctccgtgatgcacgaggctctccacaaccactacacccagaagagcctctccctgagcctcggctagtaa

SEQ ID NO: 1050 - DNA, 1344 bp, synthetic construct; identical to SEQ ID NO: 1049
  misc_feature 1..1344: note = 2D10-hVH2-hVL2 heavy chain DNA sequence
  source 1..1344: mol_type = other DNA

SEQ ID NO: 1051 - DNA, 1344 bp, synthetic construct; identical to SEQ ID NO: 1049
  misc_feature 1..1344: note = 2D10-hVH2-hVL3 heavy chain DNA sequence
  source 1..1344: mol_type = other DNA

SEQ ID NO: 1052 - DNA, 1344 bp, synthetic construct; identical to SEQ ID NO: 1049
  misc_feature 1..1344: note = 2D10-hVH2-hVL4 heavy chain DNA sequence
  source 1..1344: mol_type = other DNA

SEQ ID NO: 1053 - DNA, 663 bp, synthetic construct
  misc_feature 1..663: note = 2D10.2B2-v2 light chain DNA sequence
  source 1..663: mol_type = other DNA
gacatagtaatgacacaggccgcatttagcaatccagtaaccttgggcacatccgcctccatatcttgcaggtcatccaaaagcttgctgcactctgacggtattacttacctgtactggtatttgcagcgacctgggcaatcccctcaactcctgatttaccgcatgagcaacctggcctcaggggtgcctgaccgcttttcaggatcagggagcggcactgacttcaccttgcgaatcagcagagtagaagcagaggatgttggagtttactactgtgcccagatgatcgaatttccacttacttttggggccgggaccattctggagcttaaacgtgctgatgttgcccctactgtgtccatcttccccccctcctccgagcagctgacatccggcggcgcctccgtggtgtgcttcctgaacaacttctaccccaaagacatcaacgtgaaatggaaaatcgacggctccgagaggcagaacggcgtgctgaactcctggacagaccaggactccaaagactccacatactccatgtcctccacactgacactgacaaaagacgagtacgagaggcacaactcctacacatgcgaggccacacacaaaacatccacatcccccatcgtgaaatccttcaacaggaacgagtgctaataa

SEQ ID NO: 1054 - DNA, 660 bp, synthetic construct; identical to SEQ ID NO: 760
  misc_feature 1..660: note = 2D10-VH0-NDA-VL0 light chain DNA sequence
  source 1..660: mol_type = other DNA

SEQ ID NO: 1055 - DNA, 660 bp, synthetic construct; identical to SEQ ID NO: 760
  misc_feature 1..660: note = 2D10-VH0-QDT-VL0 light chain DNA sequence
  source 1..660: mol_type = other DNA

SEQ ID NO: 1056 - DNA, 660 bp, synthetic construct; identical to SEQ ID NO: 760
  misc_feature 1..660: note = 2D10-VH0-SDT-VL0 light chain DNA sequence
  source 1..660: mol_type = other DNA

SEQ ID NO: 1057 - DNA, 660 bp, synthetic construct; identical to SEQ ID NO: 760
  misc_feature 1..660: note = 2D10-VH0-v1-QDT light chain DNA sequence
  source 1..660: mol_type = other DNA

SEQ ID NO: 1058 - DNA, 660 bp, synthetic construct; identical to SEQ ID NO: 760
  misc_feature 1..660: note = 2D10-VH0-v2-QDT light chain DNA sequence
  source 1..660: mol_type = other DNA

SEQ ID NO: 1059 - DNA, 660 bp, synthetic construct; identical to SEQ ID NO: 911
  misc_feature 1..660: note = 2D10-hVH1-hVL1 light chain DNA sequence
  source 1..660: mol_type = other DNA

SEQ ID NO: 1060 - DNA, 660 bp, synthetic construct; identical to SEQ ID NO: 912
  misc_feature 1..660: note = 2D10-hVH1-hVL2 light chain DNA sequence
  source 1..660: mol_type = other DNA

SEQ ID NO: 1061 - DNA, 660 bp, synthetic construct; identical to SEQ ID NO: 913
  misc_feature 1..660: note = 2D10-hVH1-hVL3 light chain DNA sequence
  source 1..660: mol_type = other DNA

SEQ ID NO: 1062 - DNA, 660 bp, synthetic construct; identical to SEQ ID NO: 914
  misc_feature 1..660: note = 2D10-hVH1-hVL4 light chain DNA sequence
  source 1..660: mol_type = other DNA

SEQ ID NO: 1063 - DNA, 660 bp, synthetic construct; identical to SEQ ID NO: 911
  misc_feature 1..660: note = 2D10-hVH2-hVL1 light chain DNA sequence
  source 1..660: mol_type = other DNA

SEQ ID NO: 1064 - DNA, 660 bp, synthetic construct; identical to SEQ ID NO: 912
  misc_feature 1..660: note = 2D10-hVH2-hVL2 light chain DNA sequence
  source 1..660: mol_type = other DNA

SEQ ID NO: 1065 - DNA, 660 bp, synthetic construct; identical to SEQ ID NO: 913
  misc_feature 1..660: note = 2D10-hVH2-hVL3 light chain DNA sequence
  source 1..660: mol_type = other DNA

SEQ ID NO: 1066 - DNA, 660 bp, synthetic construct; identical to SEQ ID NO: 914
  misc_feature 1..660: note = 2D10-hVH2-hVL4 light chain DNA sequence
  source 1..660: mol_type = other DNA

SEQ ID NO: 1067 - protein, 116 aa, synthetic construct; identical to SEQ ID NO: 305
  REGION 1..116: note = VH-109 Peptide Sequence

SEQ ID NO: 1068 - protein, 116 aa, synthetic construct; identical to SEQ ID NO: 305
  REGION 1..116: note = VH-110 Peptide Sequence

SEQ ID NO: 1069 - protein, 116 aa, synthetic construct; identical to SEQ ID NO: 305
  REGION 1..116: note = VH-111 Peptide Sequence

SEQ ID NO: 1070 - protein, 116 aa, synthetic construct
  REGION 1..116: note = VH-112 Peptide Sequence
QIQLVQSGPELKKPGESVKISCKASGYAFTTYGMSWVQQAPGKGLKWMGWVNTYSGVPTYADDFKGRFAFSLETSASTAYLQINNLRNEDTATYFCARGPYAMDYWGQGTSVTVSS

SEQ ID NO: 1071 - protein, 116 aa, synthetic construct; identical to SEQ ID NO: 1070
  REGION 1..116: note = VH-113 Peptide Sequence

SEQ ID NO: 1072 - protein, 116 aa, synthetic construct
  REGION 1..116: note = VH-114 Peptide Sequence
QIQLVQSGPELKKPGESVKISCKASGYAFTTYGMSWVQQAPGKGLKWMGWVNTYSGVPTSADDFKGRFAFSLETSASTAYLQINNLRNEDTATYFCARGPYAMDYWGQGTSVTVSS

SEQ ID NO: 1073 - protein, 116 aa, synthetic construct; identical to SEQ ID NO: 1072
  REGION 1..116: note = VH-115 Peptide Sequence

SEQ ID NO: 1074 - protein, 116 aa, synthetic construct
  REGION 1..116: note = VH-116 Peptide Sequence
QVQLVQSGSELKKPGASVKVSCKASGYAFTTYGMSWVRQAPGQGLEWMGWVNTYSGVPTYAQGFTGRFVFSLDTSVSTAYLQISSLKAEDTAVYYCARGPYAMDYWGQGTLVTVSS

SEQ ID NO: 1075 - protein, 116 aa, synthetic construct; identical to SEQ ID NO: 1074
  REGION 1..116: note = VH-117 Peptide Sequence

SEQ ID NO: 1076 - protein, 116 aa, synthetic construct; identical to SEQ ID NO: 1074
  REGION 1..116: note = VH-118 Peptide Sequence

SEQ ID NO: 1077 - protein, 116 aa, synthetic construct; identical to SEQ ID NO: 1074
  REGION 1..116: note = VH-119 Peptide Sequence

SEQ ID NO: 1078 - protein, 116 aa, synthetic construct; identical to SEQ ID NO: 1074
  REGION 1..116: note = VH-120 Peptide Sequence

SEQ ID NO: 1079 - protein, 116 aa, synthetic construct; identical to SEQ ID NO: 1074
  REGION 1..116: note = VH-121 Peptide Sequence

SEQ ID NO: 1080 - protein, 116 aa, synthetic construct
  REGION 1..116: note = VH-122 Peptide Sequence
QVQLVQSGSELKKPGASVKVSCKASGYAFTTYGMSWVRQAPGQGLEWMGWVNTYSGVPTSAQGFTGRFVFSLDTSVSTAYLQISSLKAEDTAVYYCARGPYAMDYWGQGTLVTVSS

SEQ ID NO: 1081 - protein, 116 aa, synthetic construct; identical to SEQ ID NO: 1080
  REGION 1..116: note = VH-123 Peptide Sequence

SEQ ID NO: 1082 - protein, 116 aa, synthetic construct; identical to SEQ ID NO: 1080
  REGION 1..116: note = VH-124 Peptide Sequence

SEQ ID NO: 1083 - protein, 116 aa, synthetic construct; identical to SEQ ID NO: 1080
  REGION 1..116: note = VH-125 Peptide Sequence

SEQ ID NO: 1084 - protein, 116 aa, synthetic construct; identical to SEQ ID NO: 814
  REGION 1..116: note = VH-126 Peptide Sequence

SEQ ID NO: 1085 - protein, 116 aa, synthetic construct; identical to SEQ ID NO: 814
  REGION 1..116: note = VH-127 Peptide Sequence

SEQ ID NO: 1086 - protein, 116 aa, synthetic construct; identical to SEQ ID NO: 816
  REGION 1..116: note = VH-128 Peptide Sequence

SEQ ID NO: 1087 - protein, 116 aa, synthetic construct; identical to SEQ ID NO: 816
  REGION 1..116: note = VH-129 Peptide Sequence

SEQ ID NO: 1088 - protein, 116 aa, synthetic construct; identical to SEQ ID NO: 816
  REGION 1..116: note = VH-130 Peptide Sequence

SEQ ID NO: 1089 - protein, 116 aa, synthetic construct; identical to SEQ ID NO: 816
  REGION 1..116: note = VH-131 Peptide Sequence

SEQ ID NO: 1090 - protein, 116 aa, synthetic construct; identical to SEQ ID NO: 817
  REGION 1..116: note = VH-132 Peptide Sequence

SEQ ID NO: 1091 - protein, 116 aa, synthetic construct; identical to SEQ ID NO: 817
  REGION 1..116: note = VH-133 Peptide Sequence

SEQ ID NO: 1092 - protein, 116 aa, synthetic construct; identical to SEQ ID NO: 819
  REGION 1..116: note = VH-134 Peptide Sequence

SEQ ID NO: 1093 - protein, 116 aa, synthetic construct; identical to SEQ ID NO: 819
  REGION 1..116: note = VH-135 Peptide Sequence

SEQ ID NO: 1094 - protein, 116 aa, synthetic construct; identical to SEQ ID NO: 819
  REGION 1..116: note = VH-136 Peptide Sequence

SEQ ID NO: 1095 - protein, 116 aa, synthetic construct
  REGION 1..116: note = VH-137 Peptide Sequence
QIQLVQSGFELKKPGASVKISCKASGYAFTTYGMSWVRQAPGQGLEWMGWVNTYSGVPTYADAFTGRFVFSLDTSVSTAYLQISSLKAEDTAVYFCARGPYAMDYWGQGTLVTVSS

SEQ ID NO: 1096 - protein, 116 aa, synthetic construct; identical to SEQ ID NO: 1095
  REGION 1..116: note = VH-138 Peptide Sequence

SEQ ID NO: 1097 - protein, 116 aa, synthetic construct; identical to SEQ ID NO: 1095
  REGION 1..116: note = VH-139 Peptide Sequence

SEQ ID NO: 1098 - protein, 116 aa, synthetic construct; identical to SEQ ID NO: 1095
  REGION 1..116: note = VH-140 Peptide Sequence

SEQ ID NO: 1099 - protein, 116 aa, synthetic construct; identical to SEQ ID NO: 1095
  REGION 1..116: note = VH-141 Peptide Sequence

SEQ ID NO: 1100 - protein, 116 aa, synthetic construct; identical to SEQ ID NO: 1095
  REGION 1..116: note = VH-142 Peptide Sequence

SEQ ID NO: 1101 - protein, 116 aa, synthetic construct; identical to SEQ ID NO: 814
  REGION 1..116: note = VH-143 Peptide Sequence

SEQ ID NO: 1102 - protein, 116 aa, synthetic construct; identical to SEQ ID NO: 814
  REGION 1..116: note = VH-144 Peptide Sequence

SEQ ID NO: 1103 - protein, 116 aa, synthetic construct; identical to SEQ ID NO: 814
  REGION 1..116: note = VH-145 Peptide Sequence

SEQ ID NO: 1104 - protein, 116 aa, synthetic construct; identical to SEQ ID NO: 817
  REGION 1..116: note = VH-146 Peptide Sequence

SEQ ID NO: 1105 - protein, 116 aa, synthetic construct; identical to SEQ ID NO: 817
  REGION 1..116: note = VH-147 Peptide Sequence

SEQ ID NO: 1106 - protein, 116 aa, synthetic construct; identical to SEQ ID NO: 817
  REGION 1..116: note = VH-148 Peptide Sequence

SEQ ID NO: 1107 - protein, 116 aa, synthetic construct; identical to SEQ ID NO: 819
  REGION 1..116: note = VH-149 Peptide Sequence

SEQ ID NO: 1108 - protein, 116 aa, synthetic construct; identical to SEQ ID NO: 819
  REGION 1..116: note = VH-150 Peptide Sequence

SEQ ID NO: 1109 - protein, 116 aa, synthetic construct; identical to SEQ ID NO: 819
  REGION 1..116: note = VH-151 Peptide Sequence

SEQ ID NO: 1110 - protein, 107 aa, synthetic construct; identical to SEQ ID NO: 382
  REGION 1..107: note = VL-107 Peptide Sequence

SEQ ID NO: 1111 - protein, 107 aa, synthetic construct
  REGION 1..107: note = VL-108 Peptide Sequence
DIQMTQTTSSLSASLGDRVTINCSASQDISNYLNWYQQKPDGTVKLLIYYTSSLLSGVPSRFSGSGSGTDYSLTISNLEPEDIATYFCQQYSKLPYTFGSGTKLEIK

SEQ ID NO: 1112 - protein, 107 aa, synthetic construct
  REGION 1..107: note = VL-109 Peptide Sequence
DIQMTQTTSSLSASLGDRVTISCSASQDISNYLNWYQQKPDGTVKLLIYYTSSLLSGVPSRFSGSGSGTDYSLTISNLEPEDIATYFCQQYSKLPYTFGSGTHLEIK

SEQ ID NO: 1113 - protein, 107 aa, synthetic construct; identical to SEQ ID NO: 382
  REGION 1..107: note = VL-110 Peptide Sequence

SEQ ID NO: 1114 - protein, 107 aa, synthetic construct; identical to SEQ ID NO: 1112
  REGION 1..107: note = VL-111 Peptide Sequence

SEQ ID NO: 1115 - protein, 107 aa, synthetic construct; identical to SEQ ID NO: 382
  REGION 1..107: note = VL-112 Peptide Sequence

SEQ ID NO: 1116 - protein, 107 aa, synthetic construct; identical to SEQ ID NO: 1112
  REGION 1..107: note = VL-113 Peptide Sequence

SEQ ID NO: 1117 - protein, 107 aa, synthetic construct; identical to SEQ ID NO: 829
  REGION 1..107: note = VL-114 Peptide Sequence

SEQ ID NO: 1118 - protein, 107 aa, synthetic construct
  REGION 1..107: note = VL-115 Peptide Sequence
DIQMTQSPSSLSASVGDRVTITCSASQDISNYLNWYQQKPGKAPKLLIYYTSSLLTGVPSRFSGSGSGTDYTFTISSLQPEDIATYFCQQYSKLPYTFGQGTKLEIK

SEQ ID NO: 1119 - protein, 107 aa, synthetic construct; identical to SEQ ID NO: 830
  REGION 1..107: note = VL-116 Peptide Sequence

SEQ ID NO: 1120 - protein, 107 aa, synthetic construct
  REGION 1..107: note = VL-117 Peptide Sequence
DIQMTQSPSSLSASVGDRVTITCSASQDISNYLNWYQQKPGKAPKLLIYYTSSLLSGVPSRFSGSGSGTDYTLTISSLQPEDFATYFCQQYSKLPYTFGQGTKLEIK

SEQ ID NO: 1121 - protein, 107 aa, synthetic construct
  REGION 1..107: note = VL-118 Peptide Sequence
DIQMTQSPSSLSASVGDRVTINCSASQDISNYLNWYQQKPGKAPKLLIYYTSSLLTGVPSRFSGSGSGTDYTFTISSLQPEDIATYFCQQYSKLPYTFGQGTKLEIK

SEQ ID NO: 1122 - protein, 107 aa, synthetic construct
  REGION 1..107: note = VL-119 Peptide Sequence
DIQMTQSPSSLSASVGDRVTINCSASQDISNYLNWYQQKPGKAPKLLIYYTSSLLSGVPSRFSGSGSGTDYTLTISSLQPEDFATYFCQQYSKLPYTFGQGTKLEIK

SEQ ID NO: 1123 - protein, 107 aa, synthetic construct; identical to SEQ ID NO: 830
  REGION 1..107: note = VL-120 Peptide Sequence

SEQ ID NO: 1124 - protein, 107 aa, synthetic construct; identical to SEQ ID NO: 1120
  REGION 1..107: note = VL-121 Peptide Sequence

SEQ ID NO: 1125 - protein, 107 aa, synthetic construct; identical to SEQ ID NO: 1121
  REGION 1..107: note = VL-122 Peptide Sequence

SEQ ID NO: 1126 - protein, 107 aa, synthetic construct; identical to SEQ ID NO: 1122
  REGION 1..107: note = VL-123 Peptide Sequence

SEQ ID NO: 1127 - protein, 107 aa, synthetic construct; identical to SEQ ID NO: 1121
  REGION 1..107: note = VL-124 Peptide Sequence

SEQ ID NO: 1128 - protein, 107 aa, synthetic construct; identical to SEQ ID NO: 1122
  REGION 1..107: note = VL-125 Peptide Sequence

SEQ ID NO: 1129 - protein, 107 aa, synthetic construct; identical to SEQ ID NO: 830
  REGION 1..107: note = VL-126 Peptide Sequence

SEQ ID NO: 1130 - protein, 107 aa, synthetic construct; identical to SEQ ID NO: 1120
  REGION 1..107: note = VL-127 Peptide Sequence

SEQ ID NO: 1131 - protein, 107 aa, synthetic construct; identical to SEQ ID NO: 1121
  REGION 1..107: note = VL-128 Peptide Sequence

SEQ ID NO: 1132 - protein, 107 aa, synthetic construct; identical to SEQ ID NO: 1122
  REGION 1..107: note = VL-129 Peptide Sequence

SEQ ID NO: 1133 - protein, 107 aa, synthetic construct; identical to SEQ ID NO: 1121
  REGION 1..107: note = VL-130 Peptide Sequence

SEQ ID NO: 1134 - protein, 107 aa, synthetic construct; identical to SEQ ID NO: 1122
  REGION 1..107: note = VL-131 Peptide Sequence

SEQ ID NO: 1135 - protein, 107 aa, synthetic construct; identical to SEQ ID NO: 1120
  REGION 1..107: note = VL-132 Peptide Sequence

SEQ ID NO: 1136 - protein, 107 aa, synthetic construct; identical to SEQ ID NO: 1121
  REGION 1..107: note = VL-133 Peptide Sequence

SEQ ID NO: 1137 - protein, 107 aa, synthetic construct; identical to SEQ ID NO: 1122
  REGION 1..107: note = VL-134 Peptide Sequence

SEQ ID NO: 1138 - protein, 107 aa, synthetic construct; identical to SEQ ID NO: 829
  REGION 1..107: note = VL-135 Peptide Sequence

SEQ ID NO: 1139 - protein, 107 aa, synthetic construct; identical to SEQ ID NO: 1118
  REGION 1..107: note = VL-136 Peptide Sequence

SEQ ID NO: 1140 - protein, 107 aa, synthetic construct; identical to SEQ ID NO: 830
  REGION 1..107: note = VL-137 Peptide Sequence

SEQ ID NO: 1141 - protein, 107 aa, synthetic construct; identical to SEQ ID NO: 1120
  REGION 1..107: note = VL-138 Peptide Sequence

SEQ ID NO: 1142 - protein, 107 aa, synthetic construct; identical to SEQ ID NO: 1121
  REGION 1..107: note = VL-139 Peptide Sequence

SEQ ID NO: 1143 - protein, 107 aa, synthetic construct; identical to SEQ ID NO: 1122
  REGION 1..107: note = VL-140 Peptide Sequence

SEQ ID NO: 1144 - protein, 107 aa, synthetic construct; identical to SEQ ID NO: 829
  REGION 1..107: note = VL-141 Peptide Sequence

SEQ ID NO: 1145 - protein, 107 aa, synthetic construct; identical to SEQ ID NO: 829
  REGION 1..107: note = VL-142 Peptide Sequence

SEQ ID NO: 1146 - protein, 107 aa, synthetic construct; identical to SEQ ID NO: 829
  REGION 1..107: note = VL-143 Peptide Sequence

SEQ ID NO: 1147 - protein, 107 aa, synthetic construct; identical to SEQ ID NO: 829
  REGION 1..107: note = VL-144 Peptide Sequence

SEQ ID NO: 1148 - protein, 107 aa, synthetic construct; identical to SEQ ID NO: 829
  REGION 1..107: note = VL-145 Peptide Sequence

SEQ ID NO: 1149 - protein, 107 aa, synthetic construct; identical to SEQ ID NO: 829
  REGION 1..107: note = VL-146 Peptide Sequence

SEQ ID NO: 1150 - protein, 107 aa, synthetic construct; identical to SEQ ID NO: 829
  REGION 1..107: note = VL-147 Peptide Sequence

SEQ ID NO: 1151 - protein, 107 aa, synthetic construct; identical to SEQ ID NO: 829
  REGION 1..107: note = VL-148 Peptide Sequence

SEQ ID NO: 1152 - protein, 107 aa, synthetic construct; identical to SEQ ID NO: 829
  REGION 1..107: note = VL-149 Peptide Sequence

SEQ ID NO: 1153 - protein, 442 aa, synthetic construct
  REGION 1..442: note = 20H5.A3-hIgG4 (S228P) heavy chain peptide sequence
QIQLVQSGPELKKPGESVKISCKASGYAFTTYGMSWVQQAPGKGLKWMGWVNTYSGVPTCADDFKGRFAFSLETSASTAYLQINNLRNEDTATYFCARGPYAMDYWGQGTSVTVSSASTKGPSVFPLAPCSRSTSESTAALGCLVKDYFPEPVTVSWNSGALTSGVHTFPAVLQSSGLYSLSSVVTVPSSSLGTKTYTCNVDHKPSNTKVDKRVESKYGPPCPPCPAPEFLGGPSVFLFPPKPKDTLMISRTPEVTCVVVDVSQEDPEVQFNWYVDGVEVHNAKTKPREEQFNSTYRVVSVLTVLHQDWLNGKEYKCKVSNKGLPSSIEKTISKAKGQPREPQVYTLPPSQEEMTKNQVSLTCLVKGFYPSDIAVEWESNGQPENNYKTTPPVLDSDGSFFLYSRLTVDKSRWQEGNVFSCSVMHEALHNHYTQKSLSLSLG

SEQ ID NO: 1154 - protein, 442 aa, synthetic construct; identical to SEQ ID NO: 1153
  REGION 1..442: note = 20H5.A3-hIgG4 (S28P)-mv2 heavy chain peptide sequence

SEQ ID NO: 1155 - protein, 442 aa, synthetic construct; identical to SEQ ID NO: 1153
  REGION 1..442: note = 798-9.20H5.A3-mH0mL1 heavy chain peptide sequence

SEQ ID NO: 1156 - protein, 442 aa, synthetic construct
  REGION 1..442: note = 798-9.20H5.A3-mH1mL0 heavy chain peptide sequence
QIQLVQSGPELKKPGESVKISCKASGYAFTTYGMSWVQQAPGKGLKWMGWVNTYSGVPTYADDFKGRFAFSLETSASTAYLQINNLRNEDTATYFCARGPYAMDYWGQGTSVTVSSASTKGPSVFPLAPCSRSTSESTAALGCLVKDYFPEPVTVSWNSGALTSGVHTFPAVLQSSGLYSLSSVVTVPSSSLGTKTYTCNVDHKPSNTKVDKRVESKYGPPCPPCPAPEFLGGPSVFLFPPKPKDTLMISRTPEVTCVVVDVSQEDPEVQFNWYVDGVEVHNAKTKPREEQFNSTYRVVSVLTVLHQDWLNGKEYKCKVSNKGLPSSIEKTISKAKGQPREPQVYTLPPSQEEMTKNQVSLTCLVKGFYPSDIAVEWESNGQPENNYKTTPPVLDSDGSFFLYSRLTVDKSRWQEGNVFSCSVMHEALHNHYTQKSLSLSLG

SEQ ID NO: 1157 - protein, 442 aa, synthetic construct; identical to SEQ ID NO: 1156
  REGION 1..442: note = 798-9.20H5.A3-mH1mL1 heavy chain peptide sequence

SEQ ID NO: 1158 - protein, 442 aa, synthetic construct
  REGION 1..442: note = 798-9.20H5.A3-mH2mL0 heavy chain peptide sequence
QIQLVQSGPELKKPGESVKISCKASGYAFTTYGMSWVQQAPGKGLKWMGWVNTYSGVPTSADDFKGRFAFSLETSASTAYLQINNLRNEDTATYFCARGPYAMDYWGQGTSVTVSSASTKGPSVFPLAPCSRSTSESTAALGCLVKDYFPEPVTVSWNSGALTSGVHTFPAVLQSSGLYSLSSVVTVPSSSLGTKTYTCNVDHKPSNTKVDKRVESKYGPPCPPCPAPEFLGGPSVFLFPPKPKDTLMISRTPEVTCVVVDVSQEDPEVQFNWYVDGVEVHNAKTKPREEQFNSTYRVVSVLTVLHQDWLNGKEYKCKVSNKGLPSSIEKTISKAKGQPREPQVYTLPPSQEEMTKNQVSLTCLVKGFYPSDIAVEWESNGQPENNYKTTPPVLDSDGSFFLYSRLTVDKSRWQEGNVFSCSVMHEALHNHYTQKSLSLSLG

SEQ ID NO: 1159 - protein, 442 aa, synthetic construct; identical to SEQ ID NO: 1158
  REGION 1..442: note = 798-9.20H5.A3-mH2mL1 heavy chain peptide sequence

SEQ ID NO: 1160 - protein, 442 aa, synthetic construct
  REGION 1..442: note = 20H5.A3-VH1VL1 heavy chain peptide sequence
QVQLVQSGSELKKPGASVKVSCKASGYAFTTYGMSWVRQAPGQGLEWMGWVNTYSGVPTYAQGFTGRFVFSLDTSVSTAYLQISSLKAEDTAVYYCARGPYAMDYWGQGTLVTVSSASTKGPSVFPLAPCSRSTSESTAALGCLVKDYFPEPVTVSWNSGALTSGVHTFPAVLQSSGLYSLSSVVTVPSSSLGTKTYTCNVDHKPSNTKVDKRVESKYGPPCPPCPAPEFLGGPSVFLFPPKPKDTLMISRTPEVTCVVVDVSQEDPEVQFNWYVDGVEVHNAKTKPREEQFNSTYRVVSVLTVLHQDWLNGKEYKCKVSNKGLPSSIEKTISKAKGQPREPQVYTLPPSQEEMTKNQVSLTCLVKGFYPSDIAVEWESNGQPENNYKTTPPVLDSDGSFFLYSRLTVDKSRWQEGNVFSCSVMHEALHNHYTQKSLSLSLG

SEQ ID NO: 1161 - protein, 442 aa, synthetic construct; identical to SEQ ID NO: 1160
  REGION 1..442: note = 20H5.A3-VH1VL2 heavy chain peptide sequence

SEQ ID NO: 1162 - protein, 442 aa, synthetic construct; identical to SEQ ID NO: 1160
  REGION 1..442: note = 20H5.A3-VH1VL3 heavy chain peptide sequence

SEQ ID NO: 1163 - protein, 442 aa, synthetic construct; identical to SEQ ID NO: 1160
  REGION 1..442: note = 20H5.A3-VH1VL4 heavy chain peptide sequence

SEQ ID NO: 1164 - protein, 442 aa, synthetic construct; identical to SEQ ID NO: 1160
  REGION 1..442: note = 20H5.A3-VH1VL5 heavy chain peptide sequence

SEQ ID NO: 1165 - protein, 442 aa, synthetic construct; identical to SEQ ID NO: 1160
  REGION 1..442: note = 20H5.A3-VH1VL6 heavy chain peptide sequence

SEQ ID NO: 1166 - protein, 442 aa, synthetic construct
  REGION 1..442: note = 20H5.A3-VH2VL3 heavy chain peptide sequence
QVQLVQSGSELKKPGASVKVSCKASGYAFTTYGMSWVRQAPGQGLEWMGWVNTYSGVPTSAQGFTGRFVFSLDTSVSTAYLQISSLKAEDTAVYYCARGPYAMDYWGQGTLVTVSSASTKGPSVFPLAPCSRSTSESTAALGCLVKDYFPEPVTVSWNSGALTSGVHTFPAVLQSSGLYSLSSVVTVPSSSLGTKTYTCNVDHKPSNTKVDKRVESKYGPPCPPCPAPEFLGGPSVFLFPPKPKDTLMISRTPEVTCVVVDVSQEDPEVQFNWYVDGVEVHNAKTKPREEQFNSTYRVVSVLTVLHQDWLNGKEYKCKVSNKGLPSSIEKTISKAKGQPREPQVYTLPPSQEEMTKNQVSLTCLVKGFYPSDIAVEWESNGQPENNYKTTPPVLDSDGSFFLYSRLTVDKSRWQEGNVFSCSVMHEALHNHYTQKSLSLSLG

SEQ ID NO: 1167 - protein, 442 aa, synthetic construct; identical to SEQ ID NO: 1166
  REGION 1..442: note = 20H5.A3-VH2VL4 heavy chain peptide sequence

SEQ ID NO: 1168 - protein, 442 aa, synthetic construct; identical to SEQ ID NO: 1166
  REGION 1..442: note = 20H5.A3-VH2VL5 heavy chain peptide sequence

SEQ ID NO: 1169 - protein, 442 aa, synthetic construct; identical to SEQ ID NO: 1166
  REGION 1..442: note = 20H5.A3-VH2VL6 heavy chain peptide sequence

SEQ ID NO: 1170 - protein, 442 aa, synthetic construct; identical to SEQ ID NO: 844
  REGION 1..442: note = 20H5.A3-VH3VL5 heavy chain peptide sequence

SEQ ID NO: 1171 - protein, 442 aa, synthetic construct; identical to SEQ ID NO: 844
  REGION 1..442: note = 20H5.A3-VH3VL6 heavy chain peptide sequence

SEQ ID NO: 1172 - protein, 442 aa, synthetic construct; identical to SEQ ID NO: 846
  REGION 1..442: note = 20H5.A3-VH4VL3 heavy chain peptide sequence

SEQ ID NO: 1173 - protein, 442 aa, synthetic construct; identical to SEQ ID NO: 846
  REGION 1..442: note = 20H5.A3-VH4VL4 heavy chain peptide sequence

SEQ ID NO: 1174 - protein, 442 aa, synthetic construct; identical to SEQ ID NO: 846
  REGION 1..442: note = 20H5.A3-VH4VL5 heavy chain peptide sequence

SEQ ID NO: 1175 - protein, 442 aa, synthetic construct; identical to SEQ ID NO: 846
  REGION 1..442: note = 20H5.A3-VH4VL6 heavy chain peptide sequence

SEQ ID NO: 1176 - protein, 442 aa, synthetic construct; identical to SEQ ID NO: 847
  REGION 1..442: note = 20H5.A3-VH5VL5 heavy chain peptide sequence

SEQ ID NO: 1177 - protein, 442 aa, synthetic construct; identical to SEQ ID NO: 847
  REGION 1..442: note = 20H5.A3-VH5VL6 heavy chain peptide sequence

SEQ ID NO: 1178 - protein, 442 aa, synthetic construct; identical to SEQ ID NO: 849
  REGION 1..442: note = 20H5.A3-VH6VL4 heavy chain peptide sequence

SEQ ID NO: 1179 - protein, 442 aa, synthetic construct; identical to SEQ ID NO: 849
  REGION 1..442: note = 20H5.A3-VH6VL5 heavy chain peptide sequence

SEQ ID NO: 1180 - protein, 442 aa, synthetic construct; identical to SEQ ID NO: 849
  REGION 1..442: note = 20H5.A3-VH6VL6 heavy chain peptide sequence

SEQ ID NO: 1181 - protein, 442 aa, synthetic construct
  REGION 1..442: note = 20H5.A3-VH7VL1 heavy chain peptide sequence
QIQLVQSGFELKKPGASVKISCKASGYAFTTYGMSWVRQAPGQGLEWMGWVNTYSGVPTYADAFTGRFVFSLDTSVSTAYLQISSLKAEDTAVYFCARGPYAMDYWGQGTLVTVSSASTKGPSVFPLAPCSRSTSESTAALGCLVKDYFPEPVTVSWNSGALTSGVHTFPAVLQSSGLYSLSSVVTVPSSSLGTKTYTCNVDHKPSNTKVDKRVESKYGPPCPPCPAPEFLGGPSVFLFPPKPKDTLMISRTPEVTCVVVDVSQEDPEVQFNWYVDGVEVHNAKTKPREEQFNSTYRVVSVLTVLHQDWLNGKEYKCKVSNKGLPSSIEKTISKAKGQPREPQVYTLPPSQEEMTKNQVSLTCLVKGFYPSDIAVEWESNGQPENNYKTTPPVLDSDGSFFLYSRLTVDKSRWQEGNVFSCSVMHEALHNHYTQKSLSLSLG

SEQ ID NO: 1182 - protein, 442 aa, synthetic construct; identical to SEQ ID NO: 1181
  REGION 1..442: note = 20H5.A3-VH7VL2 heavy chain peptide sequence

SEQ ID NO: 1183 - protein, 442 aa, synthetic construct; identical to SEQ ID NO: 1181
  REGION 1..442: note = 20H5.A3-VH7VL3 heavy chain peptide sequence

SEQ ID NO: 1184 - protein, 442 aa, synthetic construct; identical to SEQ ID NO: 1181
  REGION 1..442: note = 20H5.A3-VH7VL4 heavy chain peptide sequence

SEQ ID NO: 1185 - protein, 442 aa, synthetic construct; identical to SEQ ID NO: 1181
  REGION 1..442: note = 20H5.A3-VH7VL5 heavy chain peptide sequence

SEQ ID NO: 1186 - protein, 442 aa, synthetic construct; identical to SEQ ID NO: 1181
  REGION 1..442: note = 20H5.A3-VH7VL6 heavy chain peptide sequence

SEQ ID NO: 1187 - protein, 445 aa, synthetic construct
  REGION 1..445: note = 20H5.A3_hVH3VL1-hIgG1 (KEMv2) heavy chain peptide sequence
QIQLVQSGSELKKPGASVKVSCKASGYAFTTYGMSWVRQAPGQGLEWMGWVNTYSGVPTYADDFTGRFVFSLETSVSTAYLQISSLKAEDTAVYFCARGPYAMDYWGQGTLVTVSSASTKGPSVFPLAPSSKSTSGGTAALGCLVKDYFPEPVTVSWNSGALTSGVHTFPAVLQSSGLYSLSSVVTVPSSSLGTQTYICNVNHKPSNTKVDKKVEPKSCDKTHTCPPCPAPELLGGPSVFLFPPKPKDTLMISRTPEVTCVVVDVSHEDPEVKFNWYVDGVEVHNAKTKPREEQYNSTYRVVSVLTVLHQDWLNGKEYKCKVSNKALPAPIEKTISKAKGQPREPQVYTLPPSREEMTKNQVSLTCLVKGFYPSDIAVEWESNGQPENNYKTTPPVLDSDGSFFLYSKLTVDKSRWQQGNVFSCSVMHEALHNHYTQKSLSLSPG

SEQ ID NO: 1188 - protein, 445 aa, synthetic construct
  REGION 1..445: note = 20H5.A3_hVH3VL1-hIgG1 (LALAPGv2) heavy chain peptide sequence
QIQLVQSGSELKKPGASVKVSCKASGYAFTTYGMSWVRQAPGQGLEWMGWVNTYSGVPTYADDFTGRFVFSLETSVSTAYLQISSLKAEDTAVYFCARGPYAMDYWGQGTLVTVSSASTKGPSVFPLAPSSKSTSGGTAALGCLVKDYFPEPVTVSWNSGALTSGVHTFPAVLQSSGLYSLSSVVTVPSSSLGTQTYICNVNHKPSNTKVDKKVEPKSCDKTHTCPPCPAPEAAGGPSVFLFPPKPKDTLMISRTPEVTCVVVDVSHEDPEVKFNWYVDGVEVHNAKTKPREEQYNSTYRVVSVLTVLHQDWLNGKEYKCKVSNKALGAPIEKTISKAKGQPREPQVYTLPPSREEMTKNQVSLTCLVKGFYPSDIAVEWESNGQPENNYKTTPPVLDSDGSFFLYSKLTVDKSRWQQGNVFSCSVMHEALHNHYTQKSLSLSPG

SEQ ID NO: 1189 - protein, 445 aa, synthetic construct
  REGION 1..445: note = 20H5.A3_hVH3VL1-hIgG1 (REM) heavy chain peptide sequence
QIQLVQSGSELKKPGASVKVSCKASGYAFTTYGMSWVRQAPGQGLEWMGWVNTYSGVPTYADDFTGRFVFSLETSVSTAYLQISSLKAEDTAVYFCARGPYAMDYWGQGTLVTVSSASTKGPSVFPLAPSSKSTSGGTAALGCLVKDYFPEPVTVSWNSGALTSGVHTFPAVLQSSGLYSLSSVVTVPSSSLGTQTYICNVNHKPSNTKVDKRVEPKSCDKTHTCPPCPAPELLGGPSVFLFPPKPKDTLMISRTPEVTCVVVDVSHEDPEVKFNWYVDGVEVHNAKTKPREEQYNSTYRVVSVLTVLHQDWLNGKEYKCKVSNKALPAPIEKTISKAKGQPREPQVYTLPPSREEMTKNQVSLTCLVKGFYPSDIAVEWESNGQPENNYKTTPPVLDSDGSFFLYSKLTVDKSRWQQGNVFSCSVMHEALHNHYTQKSLSLSPG

SEQ ID NO: 1190 - protein, 445 aa, synthetic construct
  REGION 1..445: note = 20H5.A3_hVH5VL1-hIgG1 (KEMv2) heavy chain peptide sequence
QVQLVQSGFELKKPGASVKISCKASGYAFTTYGMSWVRQAPGQGLEWMGWVNTYSGVPTYAQAFTGRFVFSLDTSVSTAYLQISSLKAEDTAVYYCARGPYAMDYWGQGTLVTVSSASTKGPSVFPLAPSSKSTSGGTAALGCLVKDYFPEPVTVSWNSGALTSGVHTFPAVLQSSGLYSLSSVVTVPSSSLGTQTYICNVNHKPSNTKVDKKVEPKSCDKTHTCPPCPAPELLGGPSVFLFPPKPKDTLMISRTPEVTCVVVDVSHEDPEVKFNWYVDGVEVHNAKTKPREEQYNSTYRVVSVLTVLHQDWLNGKEYKCKVSNKALPAPIEKTISKAKGQPREPQVYTLPPSREEMTKNQVSLTCLVKGFYPSDIAVEWESNGQPENNYKTTPPVLDSDGSFFLYSKLTVDKSRWQQGNVFSCSVMHEALHNHYTQKSLSLSPG

SEQ ID NO: 1191 - protein, 445 aa, synthetic construct
  REGION 1..445: note = 20H5.A3_hVH5VL1-hIgG1 (LALAPGv2) heavy chain peptide sequence
QVQLVQSGFELKKPGASVKISCKASGYAFTTYGMSWVRQAPGQGLEWMGWVNTYSGVPTYAQAFTGRFVFSLDTSVSTAYLQISSLKAEDTAVYYCARGPYAMDYWGQGTLVTVSSASTKGPSVFPLAPSSKSTSGGTAALGCLVKDYFPEPVTVSWNSGALTSGVHTFPAVLQSSGLYSLSSVVTVPSSSLGTQTYICNVNHKPSNTKVDKKVEPKSCDKTHTCPPCPAPEAAGGPSVFLFPPKPKDTLMISRTPEVTCVVVDVSHEDPEVKFNWYVDGVEVHNAKTKPREEQYNSTYRVVSVLTVLHQDWLNGKEYKCKVSNKALGAPIEKTISKAKGQPREPQVYTLPPSREEMTKNQVSLTCLVKGFYPSDIAVEWESNGQPENNYKTTPPVLDSDGSFFLYSKLTVDKSRWQQGNVFSCSVMHEALHNHYTQKSLSLSPG

SEQ ID NO: 1192 - protein, 445 aa, synthetic construct
  REGION 1..445: note = 20H5.A3_hVH5VL1-hIgG1 (REM) heavy chain peptide sequence
QVQLVQSGFELKKPGASVKISCKASGYAFTTYGMSWVRQAPGQGLEWMGWVNTYSGVPTYAQAFTGRFVFSLDTSVSTAYLQISSLKAEDTAVYYCARGPYAMDYWGQGTLVTVSSASTKGPSVFPLAPSSKSTSGGTAALGCLVKDYFPEPVTVSWNSGALTSGVHTFPAVLQSSGLYSLSSVVTVPSSSLGTQTYICNVNHKPSNTKVDKRVEPKSCDKTHTCPPCPAPELLGGPSVFLFPPKPKDTLMISRTPEVTCVVVDVSHEDPEVKFNWYVDGVEVHNAKTKPREEQYNSTYRVVSVLTVLHQDWLNGKEYKCKVSNKALPAPIEKTISKAKGQPREPQVYTLPPSREEMTKNQVSLTCLVKGFYPSDIAVEWESNGQPENNYKTTPPVLDSDGSFFLYSKLTVDKSRWQQGNVFSCSVMHEALHNHYTQKSLSLSPG

SEQ ID NO: 1193 - protein, 445 aa, synthetic construct
  REGION 1..445: note = 20H5.A3_hVH6VL1-hIgG1 (KEMv2) heavy chain peptide sequence
QVQLVQSGFELKKPGASVKISCKASGYAFTTYGMSWVRQAPGQGLEWMGWVNTYSGVPTSAQAFTGRFVFSLDTSVSTAYLQISSLKAEDTAVYYCARGPYAMDYWGQGTLVTVSSASTKGPSVFPLAPSSKSTSGGTAALGCLVKDYFPEPVTVSWNSGALTSGVHTFPAVLQSSGLYSLSSVVTVPSSSLGTQTYICNVNHKPSNTKVDKKVEPKSCDKTHTCPPCPAPELLGGPSVFLFPPKPKDTLMISRTPEVTCVVVDVSHEDPEVKFNWYVDGVEVHNAKTKPREEQYNSTYRVVSVLTVLHQDWLNGKEYKCKVSNKALPAPIEKTISKAKGQPREPQVYTLPPSREEMTKNQVSLTCLVKGFYPSDIAVEWESNGQPENNYKTTPPVLDSDGSFFLYSKLTVDKSRWQQGNVFSCSVMHEALHNHYTQKSLSLSPG

SEQ ID NO: 1194 - protein, 445 aa, synthetic construct
  REGION 1..445: note = 20H5.A3_hVH6VL1-hIgG1 (LALAPGv2) heavy chain peptide sequence
QVQLVQSGFELKKPGASVKISCKASGYAFTTYGMSWVRQAPGQGLEWMGWVNTYSGVPTSAQAFTGRFVFSLDTSVSTAYLQISSLKAEDTAVYYCARGPYAMDYWGQGTLVTVSSASTKGPSVFPLAPSSKSTSGGTAALGCLVKDYFPEPVTVSWNSGALTSGVHTFPAVLQSSGLYSLSSVVTVPSSSLGTQTYICNVNHKPSNTKVDKKVEPKSCDKTHTCPPCPAPEAAGGPSVFLFPPKPKDTLMISRTPEVTCVVVDVSHEDPEVKFNWYVDGVEVHNAKTKPREEQYNSTYRVVSVLTVLHQDWLNGKEYKCKVSNKALGAPIEKTISKAKGQPREPQVYTLPPSREEMTKNQVSLTCLVKGFYPSDIAVEWESNGQPENNYKTTPPVLDSDGSFFLYSKLTVDKSRWQQGNVFSCSVMHEALHNHYTQKSLSLSPG

SEQ ID NO: 1195 - protein, 445 aa, synthetic construct
  REGION 1..445: note = 20H5.A3_hVH6VL1-hIgG1 (REM) heavy chain peptide sequence
QVQLVQSGFELKKPGASVKISCKASGYAFTTYGMSWVRQAPGQGLEWMGWVNTYSGVPTSAQAFTGRFVFSLDTSVSTAYLQISSLKAEDTAVYYCARGPYAMDYWGQGTLVTVSSASTKGPSVFPLAPSSKSTSGGTAALGCLVKDYFPEPVTVSWNSGALTSGVHTFPAVLQSSGLYSLSSVVTVPSSSLGTQTYICNVNHKPSNTKVDKRVEPKSCDKTHTCPPCPAPELLGGPSVFLFPPKPKDTLMISRTPEVTCVVVDVSHEDPEVKFNWYVDGVEVHNAKTKPREEQYNSTYRVVSVLTVLHQDWLNGKEYKCKVSNKALPAPIEKTISKAKGQPREPQVYTLPPSREEMTKNQVSLTCLVKGFYPSDIAVEWESNGQPENNYKTTPPVLDSDGSFFLYSKLTVDKSRWQQGNVFSCSVMHEALHNHYTQKSLSLSPG

SEQ ID NO: 1196 - protein, 214 aa, synthetic construct
  REGION 1..214: note = 20H5.A3-hIgG4 (S228P) light chain peptide sequence
DIQMTQTTSSLSASLGDRVTINCSASQDISNYLNWYQQKPDGTVKLLIYYTSSLLSGVPSRFSGSGSGTDYSLTISNLEPEDIATYFCQQYSKLPYTFGSGTHLEIKRTVAAPSVFIFPPSDEQLKSGTASVVCLLNNFYPREAKVQWKVDNALQSGNSQESVTEQDSKDSTYSLSSTLTLSKADYEKHKVYACEVTHQGLSSPVTKSFNRGEC

SEQ ID NO: 1197 - protein, 214 aa, synthetic construct
  REGION 1..214: note = 20H5.A3-hIgG4 (S28P)-mv2 light chain peptide sequence
DIQMTQTTSSLSASLGDRVTINCSASQDISNYLNWYQQKPDGTVKLLIYYTSSLLSGVPSRFSGSGSGTDYSLTISNLEPEDIATYFCQQYSKLPYTFGSGTKLEIKRTVAAPSVFIFPPSDEQLKSGTASVVCLLNNFYPREAKVQWKVDNALQSGNSQESVTEQDSKDSTYSLSSTLTLSKADYEKHKVYACEVTHQGLSSPVTKSFNRGEC

SEQ ID NO: 1198 - protein, 214 aa, synthetic construct
  REGION 1..214: note = 798-9.20H5.A3-mH0mL1 light chain peptide sequence
DIQMTQTTSSLSASLGDRVTISCSASQDISNYLNWYQQKPDGTVKLLIYYTSSLLSGVPSRFSGSGSGTDYSLTISNLEPEDIATYFCQQYSKLPYTFGSGTHLEIKRTVAAPSVFIFPPSDEQLKSGTASVVCLLNNFYPREAKVQWKVDNALQSGNSQESVTEQDSKDSTYSLSSTLTLSKADYEKHKVYACEVTHQGLSSPVTKSFNRGEC

SEQ ID NO: 1199 - protein, 214 aa, synthetic construct; identical to SEQ ID NO: 1196
  REGION 1..214: note = 798-9.20H5.A3-mH1mL0 light chain peptide sequence

SEQ ID NO: 1200 - protein, 214 aa, synthetic construct; identical to SEQ ID NO: 1198
  REGION 1..214: note = 798-9.20H5.A3-mH1mL1 light chain peptide sequence

SEQ ID NO: 1201 - protein, 214 aa, synthetic construct; identical to SEQ ID NO: 1196
  REGION 1..214: note = 798-9.20H5.A3-mH2mL0 light chain peptide sequence

SEQ ID NO: 1202 - protein, 214 aa, synthetic construct; identical to SEQ ID NO: 1198
  REGION 1..214: note = 798-9.20H5.A3-mH2mL1 light chain peptide sequence

SEQ ID NO: 1203 - protein, 214 aa, synthetic construct; identical to SEQ ID NO: 859
  REGION 1..214: note = 20H5.A3-VH1VL1 light chain peptide sequence

SEQ ID NO: 1204 - protein, 214 aa, synthetic construct
  REGION 1..214: note = 20H5.A3-VH1VL2 light chain peptide sequence
DIQMTQSPSSLSASVGDRVTITCSASQDISNYLNWYQQKPGKAPKLLIYYTSSLLTGVPSRFSGSGSGTDYTFTISSLQPEDIATYFCQQYSKLPYTFGQGTKLEIKRTVAAPSVFIFPPSDEQLKSGTASVVCLLNNFYPREAKVQWKVDNALQSGNSQESVTEQDSKDSTYSLSSTLTLSKADYEKHKVYACEVTHQGLSSPVTKSFNRGEC

SEQ ID NO: 1205 - protein, 214 aa, synthetic construct; identical to SEQ ID NO: 860
  REGION 1..214: note = 20H5.A3-VH1VL3 light chain peptide sequence

SEQ ID NO: 1206 - protein, 214 aa, synthetic construct
  REGION 1..214: note = 20H5.A3-VH1VL4 light chain peptide sequence
DIQMTQSPSSLSASVGDRVTITCSASQDISNYLNWYQQKPGKAPKLLIYYTSSLLSGVPSRFSGSGSGTDYTLTISSLQPEDFATYFCQQYSKLPYTFGQGTKLEIKRTVAAPSVFIFPPSDEQLKSGTASVVCLLNNFYPREAKVQWKVDNALQSGNSQESVTEQDSKDSTYSLSSTLTLSKADYEKHKVYACEVTHQGLSSPVTKSFNRGEC

SEQ ID NO: 1207 - protein, 214 aa, synthetic construct
  REGION 1..214: note = 20H5.A3-VH1VL5 light chain peptide sequence
DIQMTQSPSSLSASVGDRVTINCSASQDISNYLNWYQQKPGKAPKLLIYYTSSLLTGVPSRFSGSGSGTDYTFTISSLQPEDIATYFCQQYSKLPYTFGQGTKLEIKRTVAAPSVFIFPPSDEQLKSGTASVVCLLNNFYPREAKVQWKVDNALQSGNSQESVTEQDSKDSTYSLSSTLTLSKADYEKHKVYACEVTHQGLSSPVTKSFNRGEC

SEQ ID NO: 1208 - protein, 214 aa, synthetic construct
  REGION 1..214: note = 20H5.A3-VH1VL6 light chain peptide sequence
DIQMTQSPSSLSASVGDRVTINCSASQDISNYLNWYQQKPGKAPKLLIYYTSSLLSGVPSRFSGSGSGTDYTLTISSLQPEDFATYFCQQYSKLPYTFGQGTKLEIKRTVAAPSVFIFPPSDEQLKSGTASVVCLLNNFYPREAKVQWKVDNALQSGNSQESVTEQDSKDSTYSLSSTLTLSKADYEKHKVYACEVTHQGLSSPVTKSFNRGEC

SEQ ID NO: 1209 - protein, 214 aa, synthetic construct; identical to SEQ ID NO: 860
  REGION 1..214: note = 20H5.A3-VH2VL3 light chain peptide sequence

SEQ ID NO: 1210 - protein, 214 aa, synthetic construct; identical to SEQ ID NO: 1206
  REGION 1..214: note = 20H5.A3-VH2VL4 light chain peptide sequence

SEQ ID NO: 1211 - protein, 214 aa, synthetic construct; identical to SEQ ID NO: 1207
  REGION 1..214: note = 20H5.A3-VH2VL5 light chain peptide sequence

SEQ ID NO: 1212 - protein, 214 aa, synthetic construct; identical to SEQ ID NO: 1208
  REGION 1..214: note = 20H5.A3-VH2VL6 light chain peptide sequence

SEQ ID NO: 1213 - protein, 214 aa, synthetic construct; identical to SEQ ID NO: 1207
  REGION 1..214: note = 20H5.A3-VH3VL5 light chain peptide sequence

SEQ ID NO: 1214 - protein, 214 aa, synthetic construct; identical to SEQ ID NO: 1208
  REGION 1..214: note = 20H5.A3-VH3VL6 light chain peptide sequence

SEQ ID NO: 1215 - protein, 214 aa, synthetic construct; identical to SEQ ID NO: 860
  REGION 1..214: note = 20H5.A3-VH4VL3 light chain peptide sequence

SEQ ID NO: 1216 - protein, 214 aa, synthetic construct; identical to SEQ ID NO: 1206
  REGION 1..214: note = 20H5.A3-VH4VL4 light chain peptide sequence

SEQ ID NO: 1217 - protein, 214 aa, synthetic construct; identical to SEQ ID NO: 1207
  REGION 1..214: note = 20H5.A3-VH4VL5 light chain peptide sequence

SEQ ID NO: 1218 - protein, 214 aa, synthetic construct; identical to SEQ ID NO: 1208
  REGION 1..214: note = 20H5.A3-VH4VL6 light chain peptide sequence

SEQ ID NO: 1219 - protein, 214 aa, synthetic construct; identical to SEQ ID NO: 1207
  REGION 1..214: note = 20H5.A3-VH5VL5 light chain peptide sequence

SEQ ID NO: 1220 - protein, 214 aa, synthetic construct; identical to SEQ ID NO: 1208
  REGION 1..214: note = 20H5.A3-VH5VL6 light chain peptide sequence

SEQ ID NO: 1221 - protein, 214 aa, synthetic construct; identical to SEQ ID NO: 1206
  REGION 1..214: note = 20H5.A3-VH6VL4 light chain peptide sequence

SEQ ID NO: 1222 - protein, 214 aa, synthetic construct; identical to SEQ ID NO: 1207
  REGION 1..214: note = 20H5.A3-VH6VL5 light chain peptide sequence

SEQ ID NO: 1223 - protein, 214 aa, synthetic construct; identical to SEQ ID NO: 1208
  REGION 1..214: note = 20H5.A3-VH6VL6 light chain peptide sequence

SEQ ID NO: 1224 - protein, 214 aa, synthetic construct; identical to SEQ ID NO: 859
  REGION 1..214: note = 20H5.A3-VH7VL1 light chain peptide sequence

SEQ ID NO: 1225 - protein, 214 aa, synthetic construct; identical to SEQ ID NO: 1204
  REGION 1..214: note = 20H5.A3-VH7VL2 light chain peptide sequence

SEQ ID NO: 1226 - protein, 214 aa, synthetic construct; identical to SEQ ID NO: 860
  REGION 1..214: note = 20H5.A3-VH7VL3 light chain peptide sequence

SEQ ID NO: 1227 - protein, 214 aa, synthetic construct; identical to SEQ ID NO: 1206
  REGION 1..214: note = 20H5.A3-VH7VL4 light chain peptide sequence

SEQ ID NO: 1228 - protein, 214 aa, synthetic construct; identical to SEQ ID NO: 1207
  REGION 1..214: note = 20H5.A3-VH7VL5 light chain peptide sequence

SEQ ID NO: 1229 - protein, 214 aa, synthetic construct; identical to SEQ ID NO: 1208
  REGION 1..214: note = 20H5.A3-VH7VL6 light chain peptide sequence

SEQ ID NO: 1230 - protein, 214 aa, synthetic construct; identical to SEQ ID NO: 859
  REGION 1..214: note = 20H5.A3_hVH3VL1-hIgG1 (KEMv2) light chain peptide sequence

SEQ ID NO: 1231 - protein, 214 aa, synthetic construct; identical to SEQ ID NO: 859
  REGION 1..214: note = 20H5.A3_hVH3VL1-hIgG1 (LALAPGv2) light chain peptide sequence

SEQ ID NO: 1232 - protein, 214 aa, synthetic construct; identical to SEQ ID NO: 859
  REGION 1..214: note = 20H5.A3_hVH3VL1-hIgG1 (REM) light chain peptide sequence

SEQ ID NO: 1233 - protein, 214 aa, synthetic construct; identical to SEQ ID NO: 859
  REGION 1..214: note = 20H5.A3_hVH5VL1-hIgG1 (KEMv2) light chain peptide sequence

SEQ ID NO: 1234 - protein, 214 aa, synthetic construct; identical to SEQ ID NO: 859
  REGION 1..214: note = 20H5.A3_hVH5VL1-hIgG1 (LALAPGv2) light chain peptide sequence

SEQ ID NO: 1235 - protein, 214 aa, synthetic construct; identical to SEQ ID NO: 859
  REGION 1..214: note = 20H5.A3_hVH5VL1-hIgG1 (REM) light chain peptide sequence

SEQ ID NO: 1236 - protein, 214 aa, synthetic construct; identical to SEQ ID NO: 859
  REGION 1..214: note = 20H5.A3_hVH6VL1-hIgG1 (KEMv2) light chain peptide sequence

SEQ ID NO: 1237 - protein, 214 aa, synthetic construct; identical to SEQ ID NO: 859
  REGION 1..214: note = 20H5.A3_hVH6VL1-hIgG1 (LALAPGv2) light chain peptide sequence

SEQ ID NO: 1238 - protein, 214 aa, synthetic construct; identical to SEQ ID NO: 859
  REGION 1..214: note = 20H5.A3_hVH6VL1-hIgG1 (REM) light chain peptide sequence

SEQ ID NO: 1239 - DNA, 348 bp, synthetic construct; identical to SEQ ID NO: 547
  misc_feature 1..348: note = 20H5.A3-hIgG4 (S228P) VH DNA sequence
  source 1..348: mol_type = other DNA

SEQ ID NO: 1240 - DNA, 348 bp, synthetic construct; identical to SEQ ID NO: 547
  misc_feature 1..348: note = 20H5.A3-hIgG4 (S28P)-mv2 VH DNA sequence
  source 1..348: mol_type = other DNA

SEQ ID NO: 1241 - DNA, 348 bp, synthetic construct; identical to SEQ ID NO: 547
  misc_feature 1..348: note = 798-9.20H5.A3-mH0mL1 VH DNA sequence
  source 1..348: mol_type = other DNA

SEQ ID NO: 1242 - DNA, 348 bp, synthetic construct
  misc_feature 1..348: note = 798-9.20H5.A3-mH1mL0 VH DNA sequence
  source 1..348: mol_type = other DNA
cagatccagttggtacagtctggacctgagctgaagaagcctggagagtcagtcaagatctcctgcaaggcttctggttatgccttcacaacctatggaatgagctgggtgcaacaggctccaggaaagggtttaaagtggatgggctgggtaaacacctactctggagtgccaacatatgctgatgacttcaagggacggtttgccttctctttggaaacctctgccagcactgcctatttgcagatcaacaacctcagaaatgaggacacggctacatatttctgtgcaagagggccctatgctatggactactggggtcaaggaacctcagtcaccgtctcctca

SEQ ID NO: 1243 - DNA, 348 bp, synthetic construct; identical to SEQ ID NO: 1242
  misc_feature 1..348: note = 798-9.20H5.A3-mH1mL1 VH DNA sequence
  source 1..348: mol_type = other DNA

SEQ ID NO: 1244 - DNA, 348 bp, synthetic construct
  misc_feature 1..348: note = 798-9.20H5.A3-mH2mL0 VH DNA sequence
  source 1..348: mol_type = other DNA
cagatccagttggtacagtctggacctgagctgaagaagcctggagagtcagtcaagatctcctgcaaggcttctggttatgccttcacaacctatggaatgagctgggtgcaacaggctccaggaaagggtttaaagtggatgggctgggtaaacacctactctggagtgccaacaagtgctgatgacttcaagggacggtttgccttctctttggaaacctctgccagcactgcctatttgcagatcaacaacctcagaaatgaggacacggctacatatttctgtgcaagagggccctatgctatggactactggggtcaaggaacctcagtcaccgtctcctca

SEQ ID NO: 1245 - DNA, 348 bp, synthetic construct; identical to SEQ ID NO: 1244
  misc_feature 1..348: note = 798-9.20H5.A3-mH2mL1 VH DNA sequence
  source 1..348: mol_type = other DNA

SEQ ID NO: 1246 - DNA, 348 bp, synthetic construct
  misc_feature 1..348: note = 20H5.A3-VH1VL1 VH DNA sequence
  source 1..348: mol_type = other DNA
caggtgcagctcgtccagtctggctccgagttgaagaaacccggcgcctctgtgaaagtttcctgcaaagccagtggatatgcctttaccacgtacgggatgtcctgggttcgccaggcccccggacaggggttggagtggatgggctgggtgaacacatattctggagtaccaacctatgctcagggattcaccgggcggtttgttttcagcctcgatacaagtgttagcacagcctacctgcagatctcttcccttaaggccgaggatactgcagtgtactactgtgcccgtgggccgtacgcaatggactactggggccagggaacccttgtgactgtgagctct

SEQ ID NO: 1247 - DNA, 348 bp, synthetic construct; identical to SEQ ID NO: 1246
  misc_feature 1..348: note = 20H5.A3-VH1VL2 VH DNA sequence
  source 1..348: mol_type = other DNA

SEQ ID NO: 1248 - DNA, 348 bp, synthetic construct; identical to SEQ ID NO: 1246
  misc_feature 1..348: note = 20H5.A3-VH1VL3 VH DNA sequence
  source 1..348: mol_type = other DNA

SEQ ID NO: 1249 - DNA, 348 bp, synthetic construct; identical to SEQ ID NO: 1246
  misc_feature 1..348: note = 20H5.A3-VH1VL4 VH DNA sequence
  source 1..348: mol_type = other DNA

SEQ ID NO: 1250 - DNA, 348 bp, synthetic construct; identical to SEQ ID NO: 1246
  misc_feature 1..348: note = 20H5.A3-VH1VL5 VH DNA sequence
  source 1..348: mol_type = other DNA

SEQ ID NO: 1251 - DNA, 348 bp, synthetic construct; identical to SEQ ID NO: 1246
  misc_feature 1..348: note = 20H5.A3-VH1VL6 VH DNA sequence
  source 1..348: mol_type = other DNA

SEQ ID NO: 1252 - DNA, 348 bp, synthetic construct
  misc_feature 1..348: note = 20H5.A3-VH2VL3 VH DNA sequence
  source 1..348: mol_type = other DNA
caagtgcagctagtgcagagtggctccgaactgaagaagccaggcgcttcagtgaaggtaagttgcaaggctagcggttacgcttttacaacctacggcatgtcatgggtgagacaagccccaggacaggggctagaatggatgggctgggttaacacatacagtggcgtgcccacttccgcccagggctttaccggccgtttcgttttcagtctggataccagcgtctctaccgcatacctccaaattagttctttgaaggcagaggataccgctgtttactattgcgccaggggcccgtacgctatggactactggggccaggggacactggtcaccgtcagcagt

SEQ ID NO: 1253 - DNA, 348 bp, synthetic construct; identical to SEQ ID NO: 1252
  misc_feature 1..348: note = 20H5.A3-VH2VL4 VH DNA sequence
  source 1..348: mol_type = other DNA

SEQ ID NO: 1254 - DNA, 348 bp, synthetic construct; identical to SEQ ID NO: 1252
  misc_feature 1..348: note = 20H5.A3-VH2VL5 VH DNA sequence
  source 1..348: mol_type = other DNA

SEQ ID NO: 1255 - DNA, 348 bp, synthetic construct; identical to SEQ ID NO: 1252
  misc_feature 1..348: note = 20H5.A3-VH2VL6 VH DNA sequence
  source 1..348: mol_type = other DNA

SEQ ID NO: 1256 - DNA, 348 bp, synthetic construct; identical to SEQ ID NO: 874
  misc_feature 1..348: note = 20H5.A3-VH3VL5 VH DNA sequence
  source 1..348: mol_type = other DNA

SEQ ID NO: 1257 - DNA, 348 bp, synthetic construct; identical to SEQ ID NO: 874
  misc_feature 1..348: note = 20H5.A3-VH3VL6 VH DNA sequence
  source 1..348: mol_type = other DNA

SEQ ID NO: 1258 - DNA, 348 bp, synthetic construct; identical to SEQ ID NO: 876
  misc_feature 1..348: note = 20H5.A3-VH4VL3 VH DNA sequence
  source 1..348: mol_type = other DNA

SEQ ID NO: 1259 - DNA, 348 bp, synthetic construct; identical to SEQ ID NO: 876
  misc_feature 1..348: note = 20H5.A3-VH4VL4 VH DNA sequence
  source 1..348: mol_type = other DNA

SEQ ID NO: 1260 - DNA, 348 bp, synthetic construct; identical to SEQ ID NO: 876
  misc_feature 1..348: note = 20H5.A3-VH4VL5 VH DNA sequence
  source 1..348: mol_type = other DNA

SEQ ID NO: 1261 - DNA, 348 bp, synthetic construct; identical to SEQ ID NO: 876
  misc_feature 1..348: note = 20H5.A3-VH4VL6 VH DNA sequence
  source 1..348: mol_type = other DNA

SEQ ID NO: 1262 - DNA, 348 bp, synthetic construct; identical to SEQ ID NO: 877
  misc_feature 1..348: note = 20H5.A3-VH5VL5 VH DNA sequence
  source 1..348: mol_type = other DNA

SEQ ID NO: 1263 - DNA, 348 bp, synthetic construct; identical to SEQ ID NO: 877
  misc_feature 1..348: note = 20H5.A3-VH5VL6 VH DNA sequence
  source 1..348: mol_type = other DNA

SEQ ID NO: 1264 - DNA, 348 bp, synthetic construct; identical to SEQ ID NO: 879
  misc_feature 1..348: note = 20H5.A3-VH6VL4 VH DNA sequence
  source 1..348: mol_type = other DNA

SEQ ID NO: 1265 - DNA, 348 bp, synthetic construct; identical to SEQ ID NO: 879
  misc_feature 1..348: note = 20H5.A3-VH6VL5 VH DNA sequence
  source 1..348: mol_type = other DNA

SEQ ID NO: 1266 - DNA, 348 bp, synthetic construct; identical to SEQ ID NO: 879
  misc_feature 1..348: note = 20H5.A3-VH6VL6 VH DNA sequence
  source 1..348: mol_type = other DNA

SEQ ID NO: 1267 - DNA, 348 bp, synthetic construct
  misc_feature 1..348: note = 20H5.A3-VH7VL1 VH DNA sequence
  source 1..348: mol_type = other DNA
cagattcagcttgtacagagtgggttcgaactgaagaagcccggggcctctgttaagatcagttgtaaagccagtggctacgccttcactacctacggaatgtcttgggtacggcaagcccccggacaagggctggaatggatgggctgggtaaacacatatagtggagtgcccacatatgccgatgcctttacaggccggttcgtattctctctggacacttccgtttctactgcctacctgcaaatctcttctctgaaggcagaagacacagctgtttacttttgtgctaggggtccctatgctatggattattgggggcagggcacactagtcacagtctcctca

SEQ ID NO: 1268 - DNA, 348 bp, synthetic construct; identical to SEQ ID NO: 1267
  misc_feature 1..348: note = 20H5.A3-VH7VL2 VH DNA sequence
  source 1..348: mol_type = other DNA

SEQ ID NO: 1269 - DNA, 348 bp, synthetic construct; identical to SEQ ID NO: 1267
  misc_feature 1..348: note = 20H5.A3-VH7VL3 VH DNA sequence
  source 1..348: mol_type = other DNA

SEQ ID NO: 1270 - DNA, 348 bp, synthetic construct; identical to SEQ ID NO: 1267
  misc_feature 1..348: note = 20H5.A3-VH7VL4 VH DNA sequence
  source 1..348: mol_type = other DNA

SEQ ID NO: 1271 - DNA, 348 bp, synthetic construct; identical to SEQ ID NO: 1267
  misc_feature 1..348: note = 20H5.A3-VH7VL5 VH DNA sequence
  source 1..348: mol_type = other DNA

SEQ ID NO: 1272 - DNA, 348 bp, synthetic construct; identical to SEQ ID NO: 1267
  misc_feature 1..348: note = 20H5.A3-VH7VL6 VH DNA sequence
  source 1..348: mol_type = other DNA

SEQ ID NO: 1273 - DNA, 348 bp, synthetic construct; identical to SEQ ID NO: 874
  misc_feature 1..348: note = 20H5.A3_hVH3VL1-hIgG1 (KEMv2) VH DNA sequence
  source 1..348: mol_type = other DNA

SEQ ID NO: 1274 - DNA, 348 bp, synthetic construct; identical to SEQ ID NO: 874
  misc_feature 1..348: note = 20H5.A3_hVH3VL1-hIgG1 (LALAPGv2) VH DNA sequence
  source 1..348: mol_type = other DNA

SEQ ID NO: 1275 - DNA, 348 bp, synthetic construct; identical to SEQ ID NO: 874
  misc_feature 1..348: note = 20H5.A3_hVH3VL1-hIgG1 (REM) VH DNA sequence
  source 1..348: mol_type = other DNA

SEQ ID NO: 1276 - DNA, 348 bp, synthetic construct; identical to SEQ ID NO: 877
  misc_feature 1..348: note = 20H5.A3_hVH5VL1-hIgG1 (KEMv2) VH DNA sequence
  source 1..348: mol_type = other DNA

SEQ ID NO: 1277 - DNA, 348 bp, synthetic construct; identical to SEQ ID NO: 877
  misc_feature 1..348: note = 20H5.A3_hVH5VL1-hIgG1 (LALAPGv2) VH DNA sequence
  source 1..348: mol_type = other DNA

SEQ ID NO: 1278 - DNA, 348 bp, synthetic construct; identical to SEQ ID NO: 877
  misc_feature 1..348: note = 20H5.A3_hVH5VL1-hIgG1 (REM) VH DNA sequence
  source 1..348: mol_type = other DNA

SEQ ID NO: 1279 - DNA, 348 bp, synthetic construct; identical to SEQ ID NO: 879
  misc_feature 1..348: note = 20H5.A3_hVH6VL1-hIgG1 (KEMv2) VH DNA sequence
  source 1..348: mol_type = other DNA

SEQ ID NO: 1280 - DNA, 348 bp, synthetic construct; identical to SEQ ID NO: 879
  misc_feature 1..348: note = 20H5.A3_hVH6VL1-hIgG1 (LALAPGv2) VH DNA sequence
  source 1..348: mol_type = other DNA

SEQ ID NO: 1281 - DNA, 348 bp, synthetic construct; identical to SEQ ID NO: 879
  misc_feature 1..348: note = 20H5.A3_hVH6VL1-hIgG1 (REM) VH DNA sequence
  source 1..348: mol_type = other DNA

SEQ ID NO: 1282 - DNA, 321 bp, synthetic construct; identical to SEQ ID NO: 629
  misc_feature 1..321: note = 20H5.A3-hIgG4 (S228P) VL DNA sequence
  source 1..321: mol_type = other DNA

SEQ ID NO: 1283 - DNA, 321 bp, synthetic construct
  misc_feature 1..321: note = 20H5.A3-hIgG4 (S28P)-mv2 VL DNA sequence
  source 1..321: mol_type = other DNA
gatatccagatgacacagactacatcctccctgtctgcctctctgggagacagagtcaccatcaattgcagtgcaagtcaggacattagcaattatttaaactggtatcagcagaaaccagatggaactgttaaactcctgatctattacacatcaagtttactctcaggagtcccatcaaggttcagtggcagtgggtctgggacagattattctctcaccatcagcaacctggaacctgaagatattgccacttacttttgtcagcaatatagtaagcttccctatacgttcggatcggggaccaaactggaaataaaa

SEQ ID NO: 1284 - DNA, 321 bp, synthetic construct
  misc_feature 1..321: note = 798-9.20H5.A3-mH0mL1 VL DNA sequence
  source 1..321: mol_type = other DNA
gatatccagatgacacagactacatcctccctgtctgcctctctgggagacagagtcaccatcagttgcagtgcaagtcaggacattagcaattatttaaactggtatcagcagaaaccagatggaactgttaaactcctgatctattacacatcaagtttactctcaggagtcccatcaaggttcagtggcagtgggtctgggacagattattctctcaccatcagcaacctggaacctgaagatattgccacttacttttgtcagcaatatagtaagcttccctatacgttcggatcggggacccacctggaaataaaa

SEQ ID NO: 1285 - DNA, 321 bp, synthetic construct
  misc_feature 1..321: note = 798-9.20H5.A3-mH1mL0 VL DNA sequence
  source 1..321: mol_type = other DNA
gatatccagatgacccagaccacaagctctctgtccgctagccttggagacagagtgaccatcaactgcagtgcaagccaggatatctccaactacctgaattggtaccagcagaagcctgacggtacggtgaaacttctaatatactacacttcatctctgctgtctggggtgcccagtaggttcagcggtagcggttcagggactgattattcacttacgatatcaaacctggaacccgaggacattgccacttacttctgccagcagtacagtaagttgccttatacattcggtagtggaactcaccttgagattaaa

SEQ ID NO: 1286 - DNA, 321 bp, synthetic construct; identical to SEQ ID NO: 1284
  misc_feature 1..321: note = 798-9.20H5.A3-mH1mL1 VL DNA sequence
  source 1..321: mol_type = other DNA

SEQ ID NO: 1287 - DNA, 321 bp, synthetic construct; identical to SEQ ID NO: 1285
  misc_feature 1..321: note = 798-9.20H5.A3-mH2mL0 VL DNA sequence
  source 1..321: mol_type = other DNA

SEQ ID NO: 1288 - DNA, 321 bp, synthetic construct; identical to SEQ ID NO: 1284
  misc_feature 1..321: note = 798-9.20H5.A3-mH2mL1 VL DNA sequence
  source 1..321: mol_type = other DNA

SEQ ID NO: 1289 - DNA, 321 bp, synthetic construct; identical to SEQ ID NO: 889
  misc_feature 1..321: note = 20H5.A3-VH1VL1 VL DNA sequence
  source 1..321: mol_type = other DNA

SEQ ID NO: 1290 - DNA, 321 bp, synthetic construct
  misc_feature 1..321: note = 20H5.A3-VH1VL2 VL DNA sequence
  source 1..321: mol_type = other DNA
gacatccaaatgacacagagtcccagttcccttagtgcctccgtgggggaccgtgttactatcacatgctcagctagccaagacatatccaattacctaaattggtatcagcagaagcctggcaaagcacctaagctcctgatttattacacctcatccctgttgacgggggttcccagccggtttagcggtagtgggtcaggaacagactacaccttcactataagcagcctgcaacccgaggatattgctacttatttttgtcagcagtattccaagctgccttacacattcggtcagggcacaaagctggaaattaag

SEQ ID NO: 1291 - DNA, 321 bp, synthetic construct; identical to SEQ ID NO: 890
  misc_feature 1..321: note = 20H5.A3-VH1VL3 VL DNA sequence
  source 1..321: mol_type = other DNA

SEQ ID NO: 1292 - DNA, 321 bp, synthetic construct
  misc_feature 1..321: note = 20H5.A3-VH1VL4 VL DNA sequence
  source 1..321: mol_type = other DNA
gacattcaaatgacacagagcccctctagtttgtcagccagtgtcggagaccgggtgactattacatgctcagccagtcaagacatcagcaactatctaaattggtatcagcagaaacccgggaaggctcctaagctgctgatttattacacatctagcttgctgagcggggtcccgagtagattcagtggatccggttctgggacagactataccctcaccatctcatccctgcaaccagaggacttcgctacttacttctgccagcagtatagcaaacttccctacacatttggacaggggacaaaactggagattaaa

SEQ ID NO: 1293 - DNA, 321 bp, synthetic construct
  misc_feature 1..321: note = 20H5.A3-VH1VL5 VL DNA sequence
  source 1..321: mol_type = other DNA
gacatccaaatgacacagagtcccagttcccttagtgcctccgtgggggaccgtgttactatcaactgctcagctagccaagacatatccaattacctaaattggtatcagcagaagcctggcaaagcacctaagctcctgatttattacacctcatccctgttgacgggggttcccagccggtttagcggtagtgggtcaggaacagactacaccttcactataagcagcctgcaacccgaggatattgctacttatttttgtcagcagtattccaagctgccttacacattcggtcagggcacaaagctggaaattaag

SEQ ID NO: 1294 - DNA, 321 bp, synthetic construct
  misc_feature 1..321: note = 20H5.A3-VH1VL6 VL DNA sequence
  source 1..321: mol_type = other DNA
gacattcaaatgacacagagcccctctagtttgtcagccagtgtcggagaccgggtgactattaactgctcagccagtcaagacatcagcaactatctaaattggtatcagcagaaacccgggaaggctcctaagctgctgatttattacacatctagcttgctgagcggggtcccgagtagattcagtggatccggttctgggacagactataccctcaccatctcatccctgcaaccagaggacttcgctacttacttctgccagcagtatagcaaacttccctacacatttggacaggggacaaaactggagattaaa

SEQ ID NO: 1295 - DNA, 321 bp, synthetic construct; identical to SEQ ID NO: 890
  misc_feature 1..321: note = 20H5.A3-VH2VL3 VL DNA sequence
  source 1..321: mol_type = other DNA

SEQ ID NO: 1296 - DNA, 321 bp, synthetic construct; identical to SEQ ID NO: 1292
  misc_feature 1..321: note = 20H5.A3-VH2VL4 VL DNA sequence
  source 1..321: mol_type = other DNA

SEQ ID NO: 1297 - DNA, 321 bp, synthetic construct; identical to SEQ ID NO: 1293
  misc_feature 1..321: note = 20H5.A3-VH2VL5 VL DNA sequence
  source 1..321: mol_type = other DNA

SEQ ID NO: 1298 - DNA, 321 bp, synthetic construct; identical to SEQ ID NO: 1294
  misc_feature 1..321: note = 20H5.A3-VH2VL6 VL DNA sequence
  source 1..321: mol_type = other DNA

SEQ ID NO: 1299 - DNA, 321 bp, synthetic construct; identical to SEQ ID NO: 1293
  misc_feature 1..321: note = 20H5.A3-VH3VL5 VL DNA sequence
  source 1..321: mol_type = other DNA

SEQ ID NO: 1300 - DNA, 321 bp, synthetic construct; identical to SEQ ID NO: 1294
  misc_feature 1..321: note = 20H5.A3-VH3VL6 VL DNA sequence
  source 1..321: mol_type = other DNA

SEQ ID NO: 1301 - DNA, 321 bp, synthetic construct; identical to SEQ ID NO: 890
  misc_feature 1..321: note = 20H5.A3-VH4VL3 VL DNA sequence
  source 1..321: mol_type = other DNA

SEQ ID NO: 1302 - DNA, 321 bp, synthetic construct; identical to SEQ ID NO: 1292
  misc_feature 1..321: note = 20H5.A3-VH4VL4 VL DNA sequence
  source 1..321: mol_type = other DNA

SEQ ID NO: 1303 - DNA, 321 bp, synthetic construct; identical to SEQ ID NO: 1293
  misc_feature 1..321: note = 20H5.A3-VH4VL5 VL DNA sequence
  source 1..321: mol_type = other DNA

SEQ ID NO: 1304 - DNA, 321 bp, synthetic construct; identical to SEQ ID NO: 1294
  misc_feature 1..321: note = 20H5.A3-VH4VL6 VL DNA sequence
  source 1..321: mol_type = other DNA

SEQ ID NO: 1305 - DNA, 321 bp, synthetic construct; identical to SEQ ID NO: 1293
  misc_feature 1..321: note = 20H5.A3-VH5VL5 VL DNA sequence
  source 1..321: mol_type = other DNA

SEQ ID NO: 1306 - DNA, 321 bp, synthetic construct; identical to SEQ ID NO: 1294
  misc_feature 1..321: note = 20H5.A3-VH5VL6 VL DNA sequence
  source 1..321: mol_type = other DNA

SEQ ID NO: 1307 - DNA, 321 bp, synthetic construct; identical to SEQ ID NO: 1292
  misc_feature 1..321: note = 20H5.A3-VH6VL4 VL DNA sequence
  source 1..321: mol_type = other DNA

SEQ ID NO: 1308 - DNA, 321 bp, synthetic construct; identical to SEQ ID NO: 1293
  misc_feature 1..321: note = 20H5.A3-VH6VL5 VL DNA sequence
  source 1..321: mol_type = other DNA

SEQ ID NO: 1309 - DNA, 321 bp, synthetic construct; identical to SEQ ID NO: 1292
  misc_feature 1..321: note = 20H5.A3-VH6VL6 VL DNA sequence
  source 1..321: mol_type = other DNA

SEQ ID NO: 1310 - DNA, 321 bp, synthetic construct; identical to SEQ ID NO: 889
  misc_feature 1..321: note = 20H5.A3-VH7VL1 VL DNA sequence
  source 1..321: mol_type = other DNA

SEQ ID NO: 1311 - DNA, 321 bp, synthetic construct; identical to SEQ ID NO: 1290
  misc_feature 1..321: note = 20H5.A3-VH7VL2 VL DNA sequence
  source 1..321: mol_type = other DNA

SEQ ID NO: 1312 - DNA, 321 bp, synthetic construct; identical to SEQ ID NO: 890
  misc_feature 1..321: note = 20H5.A3-VH7VL3 VL DNA sequence
  source 1..321: mol_type = other DNA

SEQ ID NO: 1313 - DNA, 321 bp, synthetic construct; identical to SEQ ID NO: 1292
  misc_feature 1..321: note = 20H5.A3-VH7VL4 VL DNA sequence
  source 1..321: mol_type = other DNA

SEQ ID NO: 1314 - DNA, 321 bp, synthetic construct; identical to SEQ ID NO: 1293
  misc_feature 1..321: note = 20H5.A3-VH7VL5 VL DNA sequence
  source 1..321: mol_type = other DNA

SEQ ID NO: 1315 - DNA, 321 bp, synthetic construct; identical to SEQ ID NO: 1293
  misc_feature 1..321: note = 20H5.A3-VH7VL6 VL DNA sequence
  source 1..321: mol_type = other DNA

SEQ ID NO: 1316 - DNA, 321 bp, synthetic construct; identical to SEQ ID NO: 889
  misc_feature 1..321: note = 20H5.A3_hVH3VL1-hIgG1 (KEMv2) VL DNA sequence
  source 1..321: mol_type = other DNA

SEQ ID NO: 1317 - DNA, 321 bp, synthetic construct; identical to SEQ ID NO: 889
  misc_feature 1..321: note = 20H5.A3_hVH3VL1-hIgG1 (LALAPGv2) VL DNA sequence
  source 1..321: mol_type = other DNA

SEQ ID NO: 1318 - DNA, 321 bp, synthetic construct; identical to SEQ ID NO: 889
  misc_feature 1..321: note = 20H5.A3_hVH3VL1-hIgG1 (REM) VL DNA sequence
  source 1..321: mol_type = other DNA

SEQ ID NO: 1319 - DNA, 321 bp, synthetic construct; identical to SEQ ID NO: 889
  misc_feature 1..321: note = 20H5.A3_hVH5VL1-hIgG1 (KEMv2) VL DNA sequence
  source 1..321: mol_type = other DNA

SEQ ID NO: 1320 - DNA, 321 bp, synthetic construct; identical to SEQ ID NO: 889
  misc_feature 1..321: note = 20H5.A3_hVH5VL1-hIgG1 (LALAPGv2) VL DNA sequence
  source 1..321: mol_type = other DNA

SEQ ID NO: 1321 - DNA, 321 bp, synthetic construct; identical to SEQ ID NO: 889
  misc_feature 1..321: note = 20H5.A3_hVH5VL1-hIgG1 (REM) VL DNA sequence
  source 1..321: mol_type = other DNA

SEQ ID NO: 1322 - DNA, 321 bp, synthetic construct; identical to SEQ ID NO: 889
  misc_feature 1..321: note = 20H5.A3_hVH6VL1-hIgG1 (KEMv2) VL DNA sequence
  source 1..321: mol_type = other DNA

SEQ ID NO: 1323 - DNA, 321 bp, synthetic construct; identical to SEQ ID NO: 889
  misc_feature 1..321: note = 20H5.A3_hVH6VL1-hIgG1 (LALAPGv2) VL DNA sequence
  source 1..321: mol_type = other DNA

SEQ ID NO: 1324 - DNA, 321 bp, synthetic construct; identical to SEQ ID NO: 889
  misc_feature 1..321: note = 20H5.A3_hVH6VL1-hIgG1 (REM) VL DNA sequence
  source 1..321: mol_type = other DNA

SEQ ID NO: 1325 - DNA, 1332 bp, synthetic construct
  misc_feature 1..1332: note = 20H5.A3-hIgG4 (S228P) heavy chain DNA sequence
  source 1..1332: mol_type = other DNA
cagatccagttggtacagtctggacctgagctgaagaagcctggagagtcagtcaagatctcctgcaaggcttctggttatgccttcacaacctatggaatgagctgggtgcaacaggctccaggaaagggtttaaagtggatgggctgggtaaacacctactctggagtgccaacatgtgctgatgacttcaagggacggtttgccttctctttggaaacctctgccagcactgcctatttgcagatcaacaacctcagaaatgaggacacggctacatatttctgtgcaagagggccctatgctatggactactggggtcaaggaacctcagtcaccgtctcctcagctagcaccaagggccccagcgtgtttcctctcgctccctgcagccggagcacatccgagagcaccgctgctctgggctgtctcgtgaaggactacttccctgaacccgtcaccgtcagctggaatagcggcgccctgacatccggcgtccacacattccccgctgtcctgcagagcagcggcctgtacagcctgagctccgtggtcaccgtgcctagcagcagcctgggaacaaagacctacacctgcaacgtggaccataagccctccaacaccaaggtggacaagcgggtggaatccaagtatggacccccctgtcctccttgccctgctcctgaatttctcggaggcccctccgtcttcctgtttccccccaagcccaaggacaccctgatgatctcccggacacccgaagtcacctgcgtcgtggtggatgtcagccaggaagatcccgaggtgcagttcaactggtacgtggacggagtggaggtgcataacgccaaaaccaagcccagggaagagcagttcaacagcacctatcgggtcgtgtccgtgctcaccgtcctgcatcaggattggctcaacggcaaggagtacaagtgcaaggtgtccaacaagggcctgccctcctccatcgagaagaccatctccaaggctaagggccaacctcgggagccccaagtgtataccctccctcccagccaggaggagatgaccaagaatcaagtgagcctgacctgcctcgtgaagggattttacccctccgacatcgctgtggaatgggaaagcaatggccaacctgagaacaactacaagaccacaccccccgtgctggactccgatggctccttcttcctgtacagcaggctgaccgtggacaaatcccggtggcaagagggaaacgtgttcagctgctccgtgatgcacgaggctctccacaaccactacacccagaagagcctctccctgagcctcggctagtaa

SEQ ID NO: 1326 - DNA, 1332 bp, synthetic construct; identical to SEQ ID NO: 1325
  misc_feature 1..1332: note = 20H5.A3-hIgG4 (S28P)-mv2 heavy chain DNA sequence
  source 1..1332: mol_type = other DNA

SEQ ID NO: 1327 - DNA, 1332 bp, synthetic construct; identical to SEQ ID NO: 1325
  misc_feature 1..1332: note = 798-9.20H5.A3-mH0mL1 heavy chain DNA sequence
  source 1..1332: mol_type = other DNA

SEQ ID NO: 1328 - DNA, 1332 bp, synthetic construct
  misc_feature 1..1332: note = 798-9.20H5.A3-mH1mL0 heavy chain DNA sequence
  source 1..1332: mol_type = other DNA
cagatccagttggtacagtctggacctgagctgaagaagcctggagagtcagtcaagatctcctgcaaggcttctggttatgccttcacaacctatggaatgagctgggtgcaacaggctccaggaaagggtttaaagtggatgggctgggtaaacacctactctggagtgccaacatatgctgatgacttcaagggacggtttgccttctctttggaaacctctgccagcactgcctatttgcagatcaacaacctcagaaatgaggacacggctacatatttctgtgcaagagggccctatgctatggactactggggtcaaggaacctcagtcaccgtctcctcagctagcaccaagggccccagcgtgtttcctctcgctccctgcagccggagcacatccgagagcaccgctgctctgggctgtctcgtgaaggactacttccctgaacccgtcaccgtcagctggaatagcggcgccctgacatccggcgtccacacattccccgctgtcctgcagagcagcggcctgtacagcctgagctccgtggtcaccgtgcctagcagcagcctgggaacaaagacctacacctgcaacgtggaccataagccctccaacaccaaggtggacaagcgggtggaatccaagtatggacccccctgtcctccttgccctgctcctgaatttctcggaggcccctccgtcttcctgtttccccccaagcccaaggacaccctgatgatctcccggacacccgaagtcacctgcgtcgtggtggatgtcagccaggaagatcccgaggtgcagttcaactggtacgtggacggagtggaggtgcataacgccaaaaccaagcccagggaagagcagttcaacagcacctatcgggtcgtgtccgtgctcaccgtcctgcatcaggattggctcaacggcaaggagtacaagtgcaaggtgtccaacaagggcctgccctcctccatcgagaagaccatctccaaggctaagggccaacctcgggagccccaagtgtataccctccctcccagccaggaggagatgaccaagaatcaagtgagcctgacctgcctcgtgaagggattttacccctccgacatcgctgtggaatgggaaagcaatggccaacctgagaacaactacaagaccacaccccccgtgctggactccgatggctccttcttcctgtacagcaggctgaccgtggacaaatcccggtggcaagagggaaacgtgttcagctgctccgtgatgcacgaggctctccacaaccactacacccagaagagcctctccctgagcctcggctagtaa

SEQ ID NO: 1329 - DNA, 1332 bp, synthetic construct; identical to SEQ ID NO: 1328
  misc_feature 1..1332: note = 798-9.20H5.A3-mH1mL1 heavy chain DNA sequence
  source 1..1332: mol_type = other DNA

SEQ ID NO: 1330 - DNA, 1332 bp, synthetic construct
  misc_feature 1..1332: note = 798-9.20H5.A3-mH2mL0 heavy chain DNA sequence
  source 1..1332: mol_type = other DNA
cagatccagttggtacagtctggacctgagctgaagaagcctggagagtcagtcaagatctcctgcaaggcttctggttatgccttcacaacctatggaatgagctgggtgcaacaggctccaggaaagggtttaaagtggatgggctgggtaaacacctactctggagtgccaacaagtgctgatgacttcaagggacggtttgccttctctttggaaacctctgccagcactgcctatttgcagatcaacaacctcagaaatgaggacacggctacatatttctgtgcaagagggccctatgctatggactactggggtcaaggaacctcagtcaccgtctcctcagctagcaccaagggccccagcgtgtttcctctcgctccctgcagccggagcacatccgagagcaccgctgctctgggctgtctcgtgaaggactacttccctgaacccgtcaccgtcagctggaatagcggcgccctgacatccggcgtccacacattccccgctgtcctgcagagcagcggcctgtacagcctgagctccgtggtcaccgtgcctagcagcagcctgggaacaaagacctacacctgcaacgtggaccataagccctccaacaccaaggtggacaagcgggtggaatccaagtatggacccccctgtcctccttgccctgctcctgaatttctcggaggcccctccgtcttcctgtttccccccaagcccaaggacaccctgatgatctcccggacacccgaagtcacctgcgtcgtggtggatgtcagccaggaagatcccgaggtgcagttcaactggtacgtggacggagtggaggtgcataacgccaaaaccaagcccagggaagagcagttcaacagcacctatcgggtcgtgtccgtgctcaccgtcctgcatcaggattggctcaacggcaaggagtacaagtgcaaggtgtccaacaagggcctgccctcctccatcgagaagaccatctccaaggctaagggccaacctcgggagccccaagtgtataccctccctcccagccaggaggagatgaccaagaatcaagtgagcctgacctgcctcgtgaagggattttacccctccgacatcgctgtggaatgggaaagcaatggccaacctgagaacaactacaagaccacaccccccgtgctggactccgatggctccttcttcctgtacagcaggctgaccgtggacaaatcccggtggcaagagggaaacgtgttcagctgctccgtgatgcacgaggctctccacaaccactacacccagaagagcctctccctgagcctcggctagtaa

SEQ ID NO: 1331 - DNA, 1332 bp, synthetic construct; identical to SEQ ID NO: 1330
  misc_feature 1..1332: note = 798-9.20H5.A3-mH2mL1 heavy chain DNA sequence
  source 1..1332: mol_type = other DNA

SEQ ID NO: 1332 - DNA, 1329 bp, synthetic construct
  misc_feature 1..1329: note = 20H5.A3-VH1VL1 heavy chain DNA sequence
  source 1..1329: mol_type = other DNA
caggtgcagctcgtccagtctggctccgagttgaagaaacccggcgcctctgtgaaagtttcctgcaaagccagtggatatgcctttaccacgtacgggatgtcctgggttcgccaggcccccggacaggggttggagtggatgggctgggtgaacacatattctggagtaccaacctatgctcagggattcaccgggcggtttgttttcagcctcgatacaagtgttagcacagcctacctgcagatctcttcccttaaggccgaggatactgcagtgtactactgtgcccgtgggccgtacgcaatggactactggggccagggaacccttgtgactgtgagctctgctagcaccaagggccccagcgtgtttcctctcgctccctgcagccggagcacatccgagagcaccgctgctctgggctgtctcgtgaaggactacttccctgaacccgtcaccgtcagctggaatagcggcgccctgacatccggcgtccacacattccccgctgtcctgcagagcagcggcctgtacagcctgagctccgtggtcaccgtgcctagcagcagcctgggaacaaagacctacacctgcaacgtggaccataagccctccaacaccaaggtggacaagcgggtggaatccaagtatggacccccctgtcctccttgccctgctcctgaatttctcggaggcccctccgtcttcctgtttccccccaagcccaaggacaccctgatgatctcccggacacccgaagtcacctgcgtcgtggtggatgtcagccaggaagatcccgaggtgcagttcaactggtacgtggacggagtggaggtgcataacgccaaaaccaagcccagggaagagcagttcaacagcacctatcgggtcgtgtccgtgctcaccgtcctgcatcaggattggctcaacggcaaggagtacaagtgcaaggtgtccaacaagggcctgccctcctccatcgagaagaccatctccaaggctaagggccaacctcgggagccccaagtgtataccctccctcccagccaggaggagatgaccaagaatcaagtgagcctgacctgcctcgtgaagggattttacccctccgacatcgctgtggaatgggaaagcaatggccaacctgagaacaactacaagaccacaccccccgtgctggactccgatggctccttcttcctgtacagcaggctgaccgtggacaaatcccggtggcaagagggaaacgtgttcagctgctccgtgatgcacgaggctctccacaaccactacacccagaagagcctctccctgagcctcggctag

SEQ ID NO: 1333 - DNA, 1329 bp, synthetic construct; identical to SEQ ID NO: 1332
  misc_feature 1..1329: note = 20H5.A3-VH1VL2 heavy chain DNA sequence
  source 1..1329: mol_type = other DNA

SEQ ID NO: 1334 - DNA, 1329 bp, synthetic construct; identical to SEQ ID NO: 1332
  misc_feature 1..1329: note = 20H5.A3-VH1VL3 heavy chain DNA sequence
  source 1..1329: mol_type = other DNA

SEQ ID NO: 1335 - DNA, 1329 bp, synthetic construct; identical to SEQ ID NO: 1332
  misc_feature 1..1329: note = 20H5.A3-VH1VL4 heavy chain DNA sequence
  source 1..1329: mol_type = other DNA

SEQ ID NO: 1336 - DNA, 1329 bp, synthetic construct; identical to SEQ ID NO: 1332
  misc_feature 1..1329: note = 20H5.A3-VH1VL5 heavy chain DNA sequence
  source 1..1329: mol_type = other DNA

SEQ ID NO: 1337 - DNA, 1329 bp, synthetic construct; identical to SEQ ID NO: 1332
  misc_feature 1..1329: note = 20H5.A3-VH1VL6 heavy chain DNA sequence
  source 1..1329: mol_type = other DNA

SEQ ID NO: 1338 - DNA, 1326 bp, synthetic construct
  misc_feature 1..1326: note = 20H5.A3-VH2VL3 heavy chain DNA sequence
  source 1..1326: mol_type = other DNA
caagtgcagctagtgcagagtggctccgaactgaagaagccaggcgcttcagtgaaggtaagttgcaaggctagcggttacgcttttacaacctacggcatgtcatgggtgagacaagccccaggacaggggctagaatggatgggctgggttaacacatacagtggcgtgcccacttccgcccagggctttaccggccgtttcgttttcagtctggataccagcgtctctaccgcatacctccaaattagttctttgaaggcagaggataccgctgtttactattgcgccaggggcccgtacgctatggactactggggccaggggacactggtcaccgtcagcagtgctagcaccaagggccccagcgtgtttcctctcgctccctgcagccggagcacatccgagagcaccgctgctctgggctgtctcgtgaaggactacttccctgaacccgtcaccgtcagctggaatagcggcgccctgacatccggcgtccacacattccccgctgtcctgcagagcagcggcctgtacagcctgagctccgtggtcaccgtgcctagcagcagcctgggaacaaagacctacacctgcaacgtggaccataagccctccaacaccaaggtggacaagcgggtggaatccaagtatggacccccctgtcctccttgccctgctcctgaatttctcggaggcccctccgtcttcctgtttccccccaagcccaaggacaccctgatgatctcccggacacccgaagtcacctgcgtcgtggtggatgtcagccaggaagatcccgaggtgcagttcaactggtacgtggacggagtggaggtgcataacgccaaaaccaagcccagggaagagcagttcaacagcacctatcgggtcgtgtccgtgctcaccgtcctgcatcaggattggctcaacggcaaggagtacaagtgcaaggtgtccaacaagggcctgccctcctccatcgagaagaccatctccaaggctaagggccaacctcgggagccccaagtgtataccctccctcccagccaggaggagatgaccaagaatcaagtgagcctgacctgcctcgtgaagggattttacccctccgacatcgctgtggaatgggaaagcaatggccaacctgagaacaactacaagaccacaccccccgtgctggactccgatggctccttcttcctgtacagcaggctgaccgtggacaaatcccggtggcaagagggaaacgtgttcagctgctccgtgatgcacgaggctctccacaaccactacacccagaagagcctctccctgagcctcggc

SEQ ID NO: 1339 - DNA, 1326 bp, synthetic construct; identical to SEQ ID NO: 1338
  misc_feature 1..1326: note = 20H5.A3-VH2VL4 heavy chain DNA sequence
  source 1..1326: mol_type = other DNA

SEQ ID NO: 1340 - DNA, 1326 bp, synthetic construct; identical to SEQ ID NO: 1338
  misc_feature 1..1326: note = 20H5.A3-VH2VL5 heavy chain DNA sequence
  source 1..1326: mol_type = other DNA

SEQ ID NO: 1341 - DNA, 1326 bp, synthetic construct; identical to SEQ ID NO: 1338
  misc_feature 1..1326: note = 20H5.A3-VH2VL6 heavy chain DNA sequence
  source 1..1326: mol_type = other DNA

SEQ ID NO: 1342 - DNA, 1332 bp, synthetic construct; identical to SEQ ID NO: 904
  misc_feature 1..1332: note = 20H5.A3-VH3VL5 heavy chain DNA sequence
  source 1..1332: mol_type = other DNA

SEQ ID NO: 1343 - DNA, 1332 bp, synthetic construct; identical to SEQ ID NO: 904
  misc_feature 1..1332: note = 20H5.A3-VH3VL6 heavy chain DNA sequence
  source 1..1332: mol_type = other DNA

SEQ ID NO: 1344 - DNA, 1331 bp, synthetic construct; identical to SEQ ID NO: 906
  misc_feature 1..1331: note = 20H5.A3-VH4VL3 heavy chain DNA sequence
  source 1..1331: mol_type = other DNA

SEQ ID NO: 1345 - DNA, 1331 bp, synthetic construct; identical to SEQ ID NO: 906
  misc_feature 1..1331: note = 20H5.A3-VH4VL4 heavy chain DNA sequence
  source 1..1331: mol_type = other DNA

SEQ ID NO: 1346 - DNA, 1331 bp, synthetic construct; identical to SEQ ID NO: 906
  misc_feature 1..1331: note = 20H5.A3-VH4VL5 heavy chain DNA sequence
  source 1..1331: mol_type = other DNA

SEQ ID NO: 1347 - DNA, 1331 bp, synthetic construct; identical to SEQ ID NO: 906
  misc_feature 1..1331: note = 20H5.A3-VH4VL6 heavy chain DNA sequence
  source 1..1331: mol_type = other DNA

SEQ ID NO: 1348 - DNA, 1332 bp, synthetic construct; identical to SEQ ID NO: 907
  misc_feature 1..1332: note = 20H5.A3-VH5VL5 heavy chain DNA sequence
  source 1..1332: mol_type = other DNA

SEQ ID NO: 1349 - DNA, 1332 bp, synthetic construct; identical to SEQ ID NO: 907
  misc_feature 1..1332: note = 20H5.A3-VH5VL6 heavy chain DNA sequence
  source 1..1332: mol_type = other DNA

SEQ ID NO: 1350 - DNA, 1332 bp, synthetic construct; identical to SEQ ID NO: 909
  misc_feature 1..1332: note = 20H5.A3-VH6VL4 heavy chain DNA sequence
  source 1..1332: mol_type = other DNA

SEQ ID NO: 1351 - DNA, 1332 bp, synthetic construct; identical to SEQ ID NO: 909
  misc_feature 1..1332: note = 20H5.A3-VH6VL5 heavy chain DNA sequence
  source 1..1332: mol_type = other DNA

SEQ ID NO: 1352 - DNA, 1332 bp, synthetic construct; identical to SEQ ID NO: 909
  misc_feature 1..1332: note = 20H5.A3-VH6VL6 heavy chain DNA sequence
  source 1..1332: mol_type = other DNA

SEQ ID NO: 1353 - DNA, 1332 bp, synthetic construct
  misc_feature 1..1332: note = 20H5.A3-VH7VL1 heavy chain DNA sequence
  source 1..1332: mol_type = other DNA
cagattcagcttgtacagagtgggttcgaactgaagaagcccggggcctctgttaagatcagttgtaaagccagtggctacgccttcactacctacggaatgtcttgggtacggcaagcccccggacaagggctggaatggatgggctgggtaaacacatatagtggagtgcccacatatgccgatgcctttacaggccggttcgtattctctctggacacttccgtttctactgcctacctgcaaatctcttctctgaaggcagaagacacagctgtttacttttgtgctaggggtccctatgctatggattattgggggcagggcacactagtcacagtctcctcagctagcaccaagggccccagcgtgtttcctctcgctccctgcagccggagcacatccgagagcaccgctgctctgggctgtctcgtgaaggactacttccctgaacccgtcaccgtcagctggaatagcggcgccctgacatccggcgtccacacattccccgctgtcctgcagagcagcggcctgtacagcctgagctccgtggtcaccgtgcctagcagcagcctgggaacaaagacctacacctgcaacgtggaccataagccctccaacaccaaggtggacaagcgggtggaatccaagtatggacccccctgtcctccttgccctgctcctgaatttctcggaggcccctccgtcttcctgtttccccccaagcccaaggacaccctgatgatctcccggacacccgaagtcacctgcgtcgtggtggatgtcagccaggaagatcccgaggtgcagttcaactggtacgtggacggagtggaggtgcataacgccaaaaccaagcccagggaagagcagttcaacagcacctatcgggtcgtgtccgtgctcaccgtcctgcatcaggattggctcaacggcaaggagtacaagtgcaaggtgtccaacaagggcctgccctcctccatcgagaagaccatctccaaggctaagggccaacctcgggagccccaagtgtataccctccctcccagccaggaggagatgaccaagaatcaagtgagcctgacctgcctcgtgaagggattttacccctccgacatcgctgtggaatgggaaagcaatggccaacctgagaacaactacaagaccacaccccccgtgctggactccgatggctccttcttcctgtacagcaggctgaccgtggacaaatcccggtggcaagagggaaacgtgttcagctgctccgtgatgcacgaggctctccacaaccactacacccagaagagcctctccctgagcctcggctagtaa

SEQ ID NO: 1354 - DNA, 1332 bp, synthetic construct; identical to SEQ ID NO: 1353
  misc_feature 1..1332: note = 20H5.A3-VH7VL2 heavy chain DNA sequence
  source 1..1332: mol_type = other DNA

SEQ ID NO: 1355 - DNA, 1332 bp, synthetic construct; identical to SEQ ID NO: 1353
  misc_feature 1..1332: note = 20H5.A3-VH7VL3 heavy chain DNA sequence
  source 1..1332: mol_type = other DNA

SEQ ID NO: 1356 - DNA, 1332 bp, synthetic construct; identical to SEQ ID NO: 1353
  misc_feature 1..1332: note = 20H5.A3-VH7VL4 heavy chain DNA sequence
  source 1..1332: mol_type = other DNA

SEQ ID NO: 1357 - DNA, 1332 bp, synthetic construct; identical to SEQ ID NO: 1353
  misc_feature 1..1332: note = 20H5.A3-VH7VL5 heavy chain DNA sequence
  source 1..1332: mol_type = other DNA

SEQ ID NO: 1358 - DNA, 1332 bp, synthetic construct; identical to SEQ ID NO: 1353
  misc_feature 1..1332: note = 20H5.A3-VH7VL6 heavy chain DNA sequence
  source 1..1332: mol_type = other DNA

SEQ ID NO: 1359 - DNA, 1341 bp, synthetic construct
  misc_feature 1..1341: note = 20H5.A3_hVH3VL1-hIgG1 (KEMv2) heavy chain DNA sequence
  source 1..1341: mol_type = other DNA
caaatccagcttgttcagagtggatcagaactcaagaagcccggagcatccgtgaaagtgtcatgcaaggccagtggctacgcttttactacatatgggatgtcttgggttcggcaggcccccggccagggactagagtggatgggctgggttaacacctatagcggagtgcctacgtacgccgatgattttacaggcaggttcgtattttctctcgaaacgtccgtcagtaccgcctacctccaaattagctctctgaaagcagaggacaccgcagtctacttttgcgccagaggtccgtatgctatggattattggggacagggcaccctggtgacagtatcctccgctagcaccaaggggccctccgtgttccccctcgcaccatcctcaaaaagtaccagtgggggtactgctgctttgggctgcttggtgaaggactattttcctgagcctgtgacagttagttggaactccggggctctgacctcaggagtccatacatttccagcagtcttgcaaagtagcgggttgtattcattgtcctctgtcgtgaccgttccctcatctagcttggggactcaaacatatatttgcaatgtaaatcacaagccttcaaacaccaaagtagataagaaggtcgagcccaaatcatgtgacaaaacacatacatgccccccatgtccagccccagagctcctgggcgggccatctgtattcctgttccccccaaagcccaaagacactttgatgataagtcgtacccctgaggtaacttgcgtggttgtcgatgtgagtcatgaagaccctgaggttaagtttaactggtacgtagacggcgttgaagtacacaatgcaaaaacaaagccaagggaagagcagtacaactctacatatagagtggtttcagtcctcactgtactgcatcaagactggctcaatggtaaggaatacaagtgcaaggtctcaaacaaggccctccctgctccaatcgaaaagaccatatctaaagctaaagggcagcctcgggagcctcaggtttacactcttccaccctccagggaggaaatgacaaagaaccaggtcagtcttacttgtctggtcaaggggttctaccccagcgacatagccgtagaatgggaatcaaatgggcagccagagaataactataagacaacccctcccgtacttgactctgatggttctttctttctctactcaaaactgaccgttgataagtcccgctggcagcaggggaatgttttctcctgctccgtgatgcatgaggctctgcataatcactacacacagaaatctttgtcactcagtccaggctagtaa

SEQ ID NO: 1360 - DNA, 1341 bp, synthetic construct
  misc_feature 1..1341: note = 20H5.A3_hVH3VL1-hIgG1 (LALAPGv2) heavy chain DNA sequence
  source 1..1341: mol_type = other DNA
caaatccagcttgttcagagtggatcagaactcaagaagcccggagcatccgtgaaagtgtcatgcaaggccagtggctacgcttttactacatatgggatgtcttgggttcggcaggcccccggccagggactagagtggatgggctgggttaacacctatagcggagtgcctacgtacgccgatgattttacaggcaggttcgtattttctctcgaaacgtccgtcagtaccgcctacctccaaattagctctctgaaagcagaggacaccgcagtctacttttgcgccagaggtccgtatgctatggattattggggacagggcaccctggtgacagtatcctccgctagcaccaaggggccctccgtgtttcccttggcaccatcctcaaaaagtaccagtgggggtactgctgctttgggctgcttggtgaaggactattttcctgagcctgtgacagttagttggaactccggggctctgacctcaggagtccatacatttccagcagtcttgcaaagtagcgggttgtattcattgtcctctgtcgtgaccgttccctcatctagcttggggactcaaacatatatttgcaatgtaaatcacaagccttcaaacaccaaagtagataagaaggtcgagcccaaatcatgtgacaaaacacatacatgccccccatgtccagccccagaggccgccggcgggccatctgtattcctgttccccccaaagcccaaagacactttgatgataagtcgtacccctgaggtaacttgcgtggttgtcgatgtgagtcatgaagaccctgaggttaagtttaactggtacgtagacggcgttgaagtacacaatgcaaaaacaaagccaagggaagagcagtacaactctacatatagagtggtttcagtcctcactgtactgcatcaagactggctcaatggtaaggaatacaagtgcaaggtctcaaacaaggccctcggcgctccaatcgaaaagaccatatctaaagctaaagggcagcctcgggagcctcaggtttacactcttccaccctccagggaggaaatgacaaagaaccaggtcagtcttacttgtctggtcaaggggttctaccccagcgacatagccgtagaatgggaatcaaatgggcagccagagaataactataagacaacccctcccgtacttgactctgatggttctttctttctctactcaaaactgaccgttgataagtcccgctggcagcaggggaatgttttctcctgctccgtgatgcatgaggctctgcataatcactacacacagaaatctttgtcactcagtccaggctagtaa

SEQ ID NO: 1361 - DNA, 1341 bp, synthetic construct
  misc_feature 1..1341: note = 20H5.A3_hVH3VL1-hIgG1 (REM) heavy chain DNA sequence
  source 1..1341: mol_type = other DNA
caaatccagcttgttcagagtggatcagaactcaagaagcccggagcatccgtgaaagtgtcatgcaaggccagtggctacgcttttactacatatgggatgtcttgggttcggcaggcccccggccagggactagagtggatgggctgggttaacacctatagcggagtgcctacgtacgccgatgattttacaggcaggttcgtattttctctcgaaacgtccgtcagtaccgcctacctccaaattagctctctgaaagcagaggacaccgcagtctacttttgcgccagaggtccgtatgctatggattattggggacagggcaccctggtgacagtatcctccgctagcaccaaggggccctccgtgtttcccttggcaccatcctcaaaaagtaccagtgggggtactgctgctttgggctgcttggtgaaggactattttcctgagcctgtgacagttagttggaactccggggctctgacctcaggagtccatacatttccagcagtcttgcaaagtagcgggttgtattcattgtcctctgtcgtgaccgttccctcatctagcttggggactcaaacatatatttgcaatgtaaatcacaagccttcaaacaccaaagtagataagagggtcgagcccaaatcatgtgacaaaacacatacatgccccccatgtccagccccagagctcctgggcgggccatctgtattcctgttccccccaaagcccaaagacactttgatgataagtcgtacccctgaggtaacttgcgtggttgtcgatgtgagtcatgaagaccctgaggttaagtttaactggtacgtagacggcgttgaagtacacaatgcaaaaacaaagccaagggaagagcagtacaactctacatatagagtggtttcagtcctcactgtactgcatcaagactggctcaatggtaaggaatacaagtgcaaggtctcaaacaaggccctccctgctccaatcgaaaagaccatatctaaagctaaagggcagcctcgggagcctcaggtttacactcttccaccctccagggaggaaatgacaaagaaccaggtcagtcttacttgtctggtcaaggggttctaccccagcgacatagccgtagaatgggaatcaaatgggcagccagagaataactataagacaacccctcccgtacttgactctgatggttctttctttctctactcaaaactgaccgttgataagtcccgctggcagcaggggaatgttttctcctgctccgtgatgcatgaggctctgcataatcactacacacagaaatctttgtcactcagtccaggctagtaa

SEQ ID NO: 1362 - DNA, 1341 bp, synthetic construct
  misc_feature 1..1341: note = 20H5.A3_hVH5VL1-hIgG1 (KEMv2) heavy chain DNA sequence
  source 1..1341: mol_type = other DNA
caagtgcaactggtgcagagcggctttgagctgaaaaagcccggcgcctctgtgaagatcagttgcaaagcttccggctacgcctttaccacctatggtatgtcttgggttagacaggctccaggacagggcctggagtggatgggttgggtcaatacctactctggagtgccaacctatgctcaggcattcacaggccggtttgtcttcagtctcgataccagcgtgtcaaccgcatacctgcagatcagctctcttaaagccgaggataccgctgtctactactgtgccagaggaccttatgccatggattactgggggcaaggcaccctcgtcacagtgtcttctgctagcaccaaggggccctccgtgttccccctcgcaccatcctcaaaaagtaccagtgggggtactgctgctttgggctgcttggtgaaggactattttcctgagcctgtgacagttagttggaactccggggctctgacctcaggagtccatacatttccagcagtcttgcaaagtagcgggttgtattcattgtcctctgtcgtgaccgttccctcatctagcttggggactcaaacatatatttgcaatgtaaatcacaagccttcaaacaccaaagtagataagaaggtcgagcccaaatcatgtgacaaaacacatacatgccccccatgtccagccccagagctcctgggcgggccatctgtattcctgttccccccaaagcccaaagacactttgatgataagtcgtacccctgaggtaacttgcgtggttgtcgatgtgagtcatgaagaccctgaggttaagtttaactggtacgtagacggcgttgaagtacacaatgcaaaaacaaagccaagggaagagcagtacaactctacatatagagtggtttcagtcctcactgtactgcatcaagactggctcaatggtaaggaatacaagtgcaaggtctcaaacaaggccctccctgctccaatcgaaaagaccatatctaaagctaaagggcagcctcgggagcctcaggtttacactcttccaccctccagggaggaaatgacaaagaaccaggtcagtcttacttgtctggtcaaggggttctaccccagcgacatagccgtagaatgggaatcaaatgggcagccagagaataactataagacaacccctcccgtacttgactctgatggttctttctttctctactcaaaactgaccgttgataagtcccgctggcagcaggggaatgttttctcctgctccgtgatgcatgaggctctgcataatcactacacacagaaatctttgtcactcagtccaggctagtaa

SEQ ID NO: 1363 - DNA, 1341 bp, synthetic construct
  misc_feature 1..1341: note = 20H5.A3_hVH5VL1-hIgG1 (LALAPGv2) heavy chain DNA sequence
  source 1..1341: mol_type = other DNA
caagtgcaactggtgcagagcggctttgagctgaaaaagcccggcgcctctgtgaagatcagttgcaaagcttccggctacgcctttaccacctatggtatgtcttgggttagacaggctccaggacagggcctggagtggatgggttgggtcaatacctactctggagtgccaacctatgctcaggcattcacaggccggtttgtcttcagtctcgataccagcgtgtcaaccgcatacctgcagatcagctctcttaaagccgaggataccgctgtctactactgtgccagaggaccttatgccatggattactgggggcaaggcaccctcgtcacagtgtcttctgctagcaccaaggggccctccgtgtttcccttggcaccatcctcaaaaagtaccagtgggggtactgctgctttgggctgcttggtgaaggactattttcctgagcctgtgacagttagttggaactccggggctctgacctcaggagtccatacatttccagcagtcttgcaaagtagcgggttgtattcattgtcctctgtcgtgaccgttccctcatctagcttggggactcaaacatatatttgcaatgtaaatcacaagccttcaaacaccaaagtagataagaaggtcgagcccaaatcatgtgacaaaacacatacatgccccccatgtccagccccagaggccgccggcgggccatctgtattcctgttccccccaaagcccaaagacactttgatgataagtcgtacccctgaggtaacttgcgtggttgtcgatgtgagtcatgaagaccctgaggttaagtttaactggtacgtagacggcgttgaagtacacaatgcaaaaacaaagccaagggaagagcagtacaactctacatatagagtggtttcagtcctcactgtactgcatcaagactggctcaatggtaaggaatacaagtgcaaggtctcaaacaaggccctcggcgctccaatcgaaaagaccatatctaaagctaaagggcagcctcgggagcctcaggtttacactcttccaccctccagggaggaaatgacaaagaaccaggtcagtcttacttgtctggtcaaggggttctaccccagcgacatagccgtagaatgggaatcaaatgggcagccagagaataactataagacaacccctcccgtacttgactctgatggttctttctttctctactcaaaactgaccgttgataagtcccgctggcagcaggggaatgttttctcctgctccgtgatgcatgaggctctgcataatcactacacacagaaatctttgtcactcagtccaggctagtaa

SEQ ID NO: 1364 - DNA, 1341 bp, synthetic construct
  misc_feature 1..1341: note = 20H5.A3_hVH5VL1-hIgG1 (REM) heavy chain DNA sequence
  source 1..1341: mol_type = other DNA
caagtgcaactggtgcagagcggctttgagctgaaaaagcccggcgcctctgtgaagatcagttgcaaagcttccggctacgcctttaccacctatggtatgtcttgggttagacaggctccaggacagggcctggagtggatgggttgggtcaatacctactctggagtgccaacctatgctcaggcattcacaggccggtttgtcttcagtctcgataccagcgtgtcaaccgcatacctgcagatcagctctcttaaagccgaggataccgctgtctactactgtgccagaggaccttatgccatggattactgggggcaaggcaccctcgtcacagtgtcttctgctagcaccaaggggccctccgtgtttcccttggcaccatcctcaaaaagtaccagtgggggtactgctgctttgggctgcttggtgaaggactattttcctgagcctgtgacagttagttggaactccggggctctgacctcaggagtccatacatttccagcagtcttgcaaagtagcgggttgtattcattgtcctctgtcgtgaccgttccctcatctagcttggggactcaaacatatatttgcaatgtaaatcacaagccttcaaacaccaaagtagataagagggtcgagcccaaatcatgtgacaaaacacatacatgccccccatgtccagccccagagctcctgggcgggccatctgtattcctgttccccccaaagcccaaagacactttgatgataagtcgtacccctgaggtaacttgcgtggttgtcgatgtgagtcatgaagaccctgaggttaagtttaactggtacgtagacggcgttgaagtacacaatgcaaaaacaaagccaagggaagagcagtacaactctacatatagagtggtttcagtcctcactgtactgcatcaagactggctcaatggtaaggaatacaagtgcaaggtctcaaacaaggccctccctgctccaatcgaaaagaccatatctaaagctaaagggcagcctcgggagcctcaggtttacactcttccaccctccagggaggaaatgacaaagaaccaggtcagtcttacttgtctggtcaaggggttctaccccagcgacatagccgtagaatgggaatcaaatgggcagccagagaataactataagacaacccctcccgtacttgactctgatggttctttctttctctactcaaaactgaccgttgataagtcccgctggcagcaggggaatgttttctcctgctccgtgatgcatgaggctctgcataatcactacacacagaaatctttgtcactcagtccaggctagtaa

SEQ ID NO: 1365 - DNA, 1341 bp, synthetic construct
  misc_feature 1..1341: note = 20H5.A3_hVH6VL1-hIgG1 (KEMv2) heavy chain DNA sequence
  source 1..1341: mol_type = other DNA
caggttcagcttgtccaatcaggctttgagctgaagaagcctggagctagcgtcaagattagttgtaaggcctcaggctacgctttcaccacctacggaatgtcctgggtgcggcaagccccaggccagggcctggagtggatgggatgggtgaatacgtacagtggcgtccccactagcgcccaggcttttactggaagattcgtgttctctcttgatacctccgtatcaaccgcttacctgcagataagttcactcaaggctgaggataccgccgtgtattattgtgcccgagggccctacgctatggattactggggacagggcacactcgtaacagtgagctctgctagcaccaaggggccctccgtgttccccctcgcaccatcctcaaaaagtaccagtgggggtactgctgctttgggctgcttggtgaaggactattttcctgagcctgtgacagttagttggaactccggggctctgacctcaggagtccatacatttccagcagtcttgcaaagtagcgggttgtattcattgtcctctgtcgtgaccgttccctcatctagcttggggactcaaacatatatttgcaatgtaaatcacaagccttcaaacaccaaagtagataagaaggtcgagcccaaatcatgtgacaaaacacatacatgccccccatgtccagccccagagctcctgggcgggccatctgtattcctgttccccccaaagcccaaagacactttgatgataagtcgtacccctgaggtaacttgcgtggttgtcgatgtgagtcatgaagaccctgaggttaagtttaactggtacgtagacggcgttgaagtacacaatgcaaaaacaaagccaagggaagagcagtacaactctacatatagagtggtttcagtcctcactgtactgcatcaagactggctcaatggtaaggaatacaagtgcaaggtctcaaacaaggccctccctgctccaatcgaaaagaccatatctaaagctaaagggcagcctcgggagcctcaggtttacactcttccaccctccagggaggaaatgacaaagaaccaggtcagtcttacttgtctggtcaaggggttctaccccagcgacatagccgtagaatgggaatcaaatgggcagccagagaataactataagacaacccctcccgtacttgactctgatggttctttctttctctactcaaaactgaccgttgataagtcccgctggcagcaggggaatgttttctcctgctccgtgatgcatgaggctctgcataatcactacacacagaaatctttgtcactcagtccaggctagtaa

SEQ ID NO: 1366 - DNA, 1341 bp, synthetic construct
  misc_feature 1..1341: note = 20H5.A3_hVH6VL1-hIgG1 (LALAPGv2) heavy chain DNA sequence
  source 1..1341: mol_type = other DNA
caggttcagcttgtccaatcaggctttgagctgaagaagcctggagctagcgtcaagattagttgtaaggcctcaggctacgctttcaccacctacggaatgtcctgggtgcggcaagccccaggccagggcctggagtggatgggatgggtgaatacgtacagtggcgtccccactagcgcccaggcttttactggaagattcgtgttctctcttgatacctccgtatcaaccgcttacctgcagataagttcactcaaggctgaggataccgccgtgtattattgtgcccgagggccctacgctatggattactggggacagggcacactcgtaacagtgagctctgctagcaccaaggggccctccgtgtttcccttggcaccatcctcaaaaagtaccagtgggggtactgctgctttgggctgcttggtgaaggactattttcctgagcctgtgacagttagttggaactccggggctctgacctcaggagtccatacatttccagcagtcttgcaaagtagcgggttgtattcattgtcctctgtcgtgaccgttccctcatctagcttggggactcaaacatatatttgcaatgtaaatcacaagccttcaaacaccaaagtagataagaaggtcgagcccaaatcatgtgacaaaacacatacatgccccccatgtccagccccagaggccgccggcgggccatctgtattcctgttccccccaaagcccaaagacactttgatgataagtcgtacccctgaggtaacttgcgtggttgtcgatgtgagtcatgaagaccctgaggttaagtttaactggtacgtagacggcgttgaagtacacaatgcaaaaacaaagccaagggaagagcagtacaactctacatatagagtggtttcagtcctcactgtactgcatcaagactggctcaatggtaaggaatacaagtgcaaggtctcaaacaaggccctcggcgctccaatcgaaaagaccatatctaaagctaaagggcagcctcgggagcctcaggtttacactcttccaccctccagggaggaaatgacaaagaaccaggtcagtcttacttgtctggtcaaggggttctaccccagcgacatagccgtagaatgggaatcaaatgggcagccagagaataactataagacaacccctcccgtacttgactctgatggttctttctttctctactcaaaactgaccgttgataagtcccgctggcagcaggggaatgttttctcctgctccgtgatgcatgaggctctgcataatcactacacacagaaatctttgtcactcagtccaggctagtaa

SEQ ID NO: 1367 - DNA, 1341 bp, synthetic construct
  misc_feature 1..1341: note = 20H5.A3_hVH6VL1-hIgG1 (REM) heavy chain DNA sequence
  source 1..1341: mol_type = other DNA
caggttcagcttgtccaatcaggctttgagctgaagaagcctggagctagcgtcaagattagttgtaaggcctcaggctacgctttcaccacctacggaatgtcctgggtgcggcaagccccaggccagggcctggagtggatgggatgggtgaatacgtacagtggcgtccccactagcgcccaggcttttactggaagattcgtgttctctcttgatacctccgtatcaaccgcttacctgcagataagttcactcaaggctgaggataccgccgtgtattattgtgcccgagggccctacgctatggattactggggacagggcacactcgtaacagtgagctctgctagcaccaaggggccctccgtgtttcccttggcaccatcctcaaaaagtaccagtgggggtactgctgctttgggctgcttggtgaaggactattttcctgagcctgtgacagttagttggaactccggggctctgacctcaggagtccatacatttccagcagtcttgcaaagtagcgggttgtattcattgtcctctgtcgtgaccgttccctcatctagcttggggactcaaacatatatttgcaatgtaaatcacaagccttcaaacaccaaagtagataagagggtcgagcccaaatcatgtgacaaaacacatacatgccccccatgtccagccccagagctcctgggcgggccatctgtattcctgttccccccaaagcccaaagacactttgatgataagtcgtacccctgaggtaacttgcgtggttgtcgatgtgagtcatgaagaccctgaggttaagtttaactggtacgtagacggcgttgaagtacacaatgcaaaaacaaagccaagggaagagcagtacaactctacatatagagtggtttcagtcctcactgtactgcatcaagactggctcaatggtaaggaatacaagtgcaaggtctcaaacaaggccctccctgctccaatcgaaaagaccatatctaaagctaaagggcagcctcgggagcctcaggtttacactcttccaccctccagggaggaaatgacaaagaaccaggtcagtcttacttgtctggtcaaggggttctaccccagcgacatagccgtagaatgggaatcaaatgggcagccagagaataactataagacaacccctcccgtacttgactctgatggttctttctttctctactcaaaactgaccgttgataagtcccgctggcagcaggggaatgttttctcctgctccgtgatgcatgaggctctgcataatcactacacacagaaatctttgtcactcagtccaggctagtaa

SEQ ID NO: 1368 - DNA, 645 bp, synthetic construct
  misc_feature 1..645: note = 20H5.A3-hIgG4 (S228P) light chain DNA sequence
  source 1..645: mol_type = other DNA
gatatccagatgacacagactacatcctccctgtctgcctctctgggagacagagtcaccatcaattgcagtgcaagtcaggacattagcaattatttaaactggtatcagcagaaaccagatggaactgttaaactcctgatctattacacatcaagtttactctcaggagtcccatcaaggttcagtggcagtgggtctgggacagattattctctcaccatcagcaacctggaacctgaagatattgccacttacttttgtcagcaatatagtaagcttccctatacgttcggatcggggacccacctggaaataaaacggaccgtggccgcccccagcgtgttcatcttccctcccagcgacgagcagctgaagtctggcaccgccagcgtggtgtgcctgctgaacaacttctacccccgcgaggccaaggtgcagtggaaggtggacaacgccctgcagagcggcaacagccaggagagcgtgaccgagcaggactccaaggacagcacctacagcctgagcagcaccctgaccctgagcaaggccgactacgagaagcacaaggtgtacgcctgcgaggtgacccaccagggactgtctagccccgtgaccaagagcttcaaccggggcgagtgctaa

SEQ ID NO: 1369 - DNA, 645 bp, synthetic construct
  misc_feature 1..645: note = 20H5.A3-hIgG4 (S28P)-mv2 light chain DNA sequence
  source 1..645: mol_type = other DNA
gatatccagatgacacagactacatcctccctgtctgcctctctgggagacagagtcaccatcaattgcagtgcaagtcaggacattagcaattatttaaactggtatcagcagaaaccagatggaactgttaaactcctgatctattacacatcaagtttactctcaggagtcccatcaaggttcagtggcagtgggtctgggacagattattctctcaccatcagcaacctggaacctgaagatattgccacttacttttgtcagcaatatagtaagcttccctatacgttcggatcggggaccaaactggaaataaaacggaccgtggccgcccccagcgtgttcatcttccctcccagcgacgagcagctgaagtctggcaccgccagcgtggtgtgcctgctgaacaacttctacccccgcgaggccaaggtgcagtggaaggtggacaacgccctgcagagcggcaacagccaggagagcgtgaccgagcaggactccaaggacagcacctacagcctgagcagcaccctgaccctgagcaaggccgactacgagaagcacaaggtgtacgcctgcgaggtgacccaccagggactgtctagccccgtgaccaagagcttcaaccggggcgagtgctaa

SEQ ID NO: 1370 - DNA, 645 bp, synthetic construct
  misc_feature 1..645: note = 798-9.20H5.A3-mH0mL1 light chain DNA sequence
  source 1..645: mol_type = other DNA
gatatccagatgacacagactacatcctccctgtctgcctctctgggagacagagtcaccatcagttgcagtgcaagtcaggacattagcaattatttaaactggtatcagcagaaaccagatggaactgttaaactcctgatctattacacatcaagtttactctcaggagtcccatcaaggttcagtggcagtgggtctgggacagattattctctcaccatcagcaacctggaacctgaagatattgccacttacttttgtcagcaatatagtaagcttccctatacgttcggatcggggacccacctggaaataaaacggaccgtggccgcccccagcgtgttcatcttccctcccagcgacgagcagctgaagtctggcaccgccagcgtggtgtgcctgctgaacaacttctacccccgcgaggccaaggtgcagtggaaggtggacaacgccctgcagagcggcaacagccaggagagcgtgaccgagcaggactccaaggacagcacctacagcctgagcagcaccctgaccctgagcaaggccgactacgagaagcacaaggtgtacgcctgcgaggtgacccaccagggactgtctagccccgtgaccaagagcttcaaccggggcgagtgctaa

SEQ ID NO: 1371 - DNA, 648 bp, synthetic construct
  misc_feature 1..648: note = 798-9.20H5.A3-mH1mL0 light chain DNA sequence
  source 1..648: mol_type = other DNA
gatatccagatgacccagaccacaagctctctgtccgctagccttggagacagagtgaccatcaactgcagtgcaagccaggatatctccaactacctgaattggtaccagcagaagcctgacggtacggtgaaacttctaatatactacacttcatctctgctgtctggggtgcccagtaggttcagcggtagcggttcagggactgattattcacttacgatatcaaacctggaacccgaggacattgccacttacttctgccagcagtacagtaagttgccttatacattcggtagtggaactcaccttgagattaaacgtgctgatgttgcccctactgtgtccatcttccccccctcctccgagcagctgacatccggcggcgcctccgtggtgtgcttcctgaacaacttctaccccaaagacatcaacgtgaaatggaaaatcgacggctccgagaggcagaacggcgtgctgaactcctggacagaccaggactccaaagactccacatactccatgtcctccacactgacactgacaaaagacgagtacgagaggcacaactcctacacatgcgaggccacacacaaaacatccacatcccccatcgtgaaatccttcaacaggaacgagtgctaataa

SEQ ID NO: 1372 - DNA, 645 bp, synthetic construct; identical to SEQ ID NO: 1370
  misc_feature 1..645: note = 798-9.20H5.A3-mH1mL1 light chain DNA sequence
  source 1..645: mol_type = other DNA

SEQ ID NO: 1373 - DNA, 648 bp, synthetic construct; identical to SEQ ID NO: 1371
  misc_feature 1..648: note = 798-9.20H5.A3-mH2mL0 light chain DNA sequence
  source 1..648: mol_type = other DNA

SEQ ID NO: 1374 - DNA, 645 bp, synthetic construct; identical to SEQ ID NO: 1370
  misc_feature 1..645: note = 798-9.20H5.A3-mH2mL1 light chain DNA sequence
  source 1..645: mol_type = other DNA

SEQ ID NO: 1375 - DNA, 645 bp, synthetic construct; identical to SEQ ID NO: 919
  misc_feature 1..645: note = 20H5.A3-VH1VL1 light chain DNA sequence
  source 1..645: mol_type = other DNA

SEQ ID NO: 1376 - DNA, 645 bp, synthetic construct
  misc_feature 1..645: note = 20H5.A3-VH1VL2 light chain DNA sequence
  source 1..645: mol_type = other DNA
gacatccaaatgacacagagtcccagttcccttagtgcctccgtgggggaccgtgttactatcacatgctcagctagccaagacatatccaattacctaaattggtatcagcagaagcctggcaaagcacctaagctcctgatttattacacctcatccctgttgacgggggttcccagccggtttagcggtagtgggtcaggaacagactacaccttcactataagcagcctgcaacccgaggatattgctacttatttttgtcagcagtattccaagctgccttacacattcggtcagggcacaaagctggaaattaagaggaccgtggccgcccccagcgtgttcatcttccctcccagcgacgagcagctgaagtctggcaccgccagcgtggtgtgcctgctgaacaacttctacccccgcgaggccaaggtgcagtggaaggtggacaacgccctgcagagcggcaacagccaggagagcgtgaccgagcaggactccaaggacagcacctacagcctgagcagcaccctgaccctgagcaaggccgactacgagaagcacaaggtgtacgcctgcgaggtgacccaccagggactgtctagccccgtgaccaagagcttcaaccggggcgagtgctaa

SEQ ID NO: 1377 - DNA, 645 bp, synthetic construct; identical to SEQ ID NO: 920
  misc_feature 1..645: note = 20H5.A3-VH1VL3 light chain DNA sequence
  source 1..645: mol_type = other DNA

SEQ ID NO: 1378 - DNA, 645 bp, synthetic construct
  misc_feature 1..645: note = 20H5.A3-VH1VL4 light chain DNA sequence
  source 1..645: mol_type = other DNA
gacattcaaatgacacagagcccctctagtttgtcagccagtgtcggagaccgggtgactattacatgctcagccagtcaagacatcagcaactatctaaattggtatcagcagaaacccgggaaggctcctaagctgctgatttattacacatctagcttgctgagcggggtcccgagtagattcagtggatccggttctgggacagactataccctcaccatctcatccctgcaaccagaggacttcgctacttacttctgccagcagtatagcaaacttccctacacatttggacaggggacaaaactggagattaaaaggaccgtggccgcccccagcgtgttcatcttccctcccagcgacgagcagctgaagtctggcaccgccagcgtggtgtgcctgctgaacaacttctacccccgcgaggccaaggtgcagtggaaggtggacaacgccctgcagagcggcaacagccaggagagcgtgaccgagcaggactccaaggacagcacctacagcctgagcagcaccctgaccctgagcaaggccgactacgagaagcacaaggtgtacgcctgcgaggtgacccaccagggactgtctagccccgtgaccaagagcttcaaccggggcgagtgctaa

SEQ ID NO: 1379 - DNA, 645 bp, synthetic construct
  misc_feature 1..645: note = 20H5.A3-VH1VL5 light chain DNA sequence
  source 1..645: mol_type = other DNA
gacatccaaatgacacagagtcccagttcccttagtgcctccgtgggggaccgtgttactatcaactgctcagctagccaagacatatccaattacctaaattggtatcagcagaagcctggcaaagcacctaagctcctgatttattacacctcatccctgttgacgggggttcccagccggtttagcggtagtgggtcaggaacagactacaccttcactataagcagcctgcaacccgaggatattgctacttatttttgtcagcagtattccaagctgccttacacattcggtcagggcacaaagctggaaattaagaggaccgtggccgcccccagcgtgttcatcttccctcccagcgacgagcagctgaagtctggcaccgccagcgtggtgtgcctgctgaacaacttctacccccgcgaggccaaggtgcagtggaaggtggacaacgccctgcagagcggcaacagccaggagagcgtgaccgagcaggactccaaggacagcacctacagcctgagcagcaccctgaccctgagcaaggccgactacgagaagcacaaggtgtacgcctgcgaggtgacccaccagggactgtctagccccgtgaccaagagcttcaaccggggcgagtgctaa

SEQ ID NO: 1380 - DNA, 645 bp, synthetic construct
  misc_feature 1..645: note = 20H5.A3-VH1VL6 light chain DNA sequence
  source 1..645: mol_type = other DNA
gacattcaaatgacacagagcccctctagtttgtcagccagtgtcggagaccgggtgactattaactgctcagccagtcaagacatcagcaactatctaaattggtatcagcagaaacccgggaaggctcctaagctgctgatttattacacatctagcttgctgagcggggtcccgagtagattcagtggatccggttctgggacagactataccctcaccatctcatccctgcaaccagaggacttcgctacttacttctgccagcagtatagcaaacttccctacacatttggacaggggacaaaactggagattaaaaggaccgtggccgcccccagcgtgttcatcttccctcccagcgacgagcagctgaagtctggcaccgccagcgtggtgtgcctgctgaacaacttctacccccgcgaggccaaggtgcagtggaaggtggacaacgccctgcagagcggcaacagccaggagagcgtgaccgagcaggactccaaggacagcacctacagcctgagcagcaccctgaccctgagcaaggccgactacgagaagcacaaggtgtacgcctgcgaggtgacccaccagggactgtctagccccgtgaccaagagcttcaaccggggcgagtgctaa

SEQ ID NO: 1381 - DNA, 645 bp, synthetic construct; identical to SEQ ID NO: 920
  misc_feature 1..645: note = 20H5.A3-VH2VL3 light chain DNA sequence
  source 1..645: mol_type = other DNA

SEQ ID NO: 1382 - DNA, 645 bp, synthetic construct; identical to SEQ ID NO: 1378
  misc_feature 1..645: note = 20H5.A3-VH2VL4 light chain DNA sequence
  source 1..645: mol_type = other DNA

SEQ ID NO: 1383 - DNA, 645 bp, synthetic construct; identical to SEQ ID NO: 1379
  misc_feature 1..645: note = 20H5.A3-VH2VL5 light chain DNA sequence
  source 1..645: mol_type = other DNA

SEQ ID NO: 1384 - DNA, 645 bp, synthetic construct; identical to SEQ ID NO: 1380
  misc_feature 1..645: note = 20H5.A3-VH2VL6 light chain DNA sequence
  source 1..645: mol_type = other DNA

SEQ ID NO: 1385 - DNA, 645 bp, synthetic construct; identical to SEQ ID NO: 1379
  misc_feature 1..645: note = 20H5.A3-VH3VL5 light chain DNA sequence
  source 1..645: mol_type = other DNA

SEQ ID NO: 1386 - DNA, 645 bp, synthetic construct; identical to SEQ ID NO: 1380
  misc_feature 1..645: note = 20H5.A3-VH3VL6 light chain DNA sequence
  source 1..645: mol_type = other DNA

SEQ ID NO: 1387 - DNA, 645 bp, synthetic construct; identical to SEQ ID NO: 920
  misc_feature 1..645: note = 20H5.A3-VH4VL3 light chain DNA sequence
  source 1..645: mol_type = other DNA

SEQ ID NO: 1388 - DNA, 645 bp, synthetic construct; identical to SEQ ID NO: 1378
  misc_feature 1..645: note = 20H5.A3-VH4VL4 light chain DNA sequence
  source 1..645: mol_type = other DNA

SEQ ID NO: 1389 - DNA, 645 bp, synthetic construct; identical to SEQ ID NO: 1379
  misc_feature 1..645: note = 20H5.A3-VH4VL5 light chain DNA sequence
  source 1..645: mol_type = other DNA

SEQ ID NO: 1390 - DNA, 645 bp, synthetic construct; identical to SEQ ID NO: 1380
  misc_feature 1..645: note = 20H5.A3-VH4VL6 light chain DNA sequence
  source 1..645: mol_type = other DNA

SEQ ID NO: 1391 - DNA, 645 bp, synthetic construct; identical to SEQ ID NO: 1379
  misc_feature 1..645: note = 20H5.A3-VH5VL5 light chain DNA sequence
  source 1..645: mol_type = other DNA

SEQ ID NO: 1392 - DNA, 645 bp, synthetic construct; identical to SEQ ID NO: 1380
  misc_feature 1..645: note = 20H5.A3-VH5VL6 light chain DNA sequence
  source 1..645: mol_type = other DNA

SEQ ID NO: 1393 - DNA, 645 bp, synthetic construct; identical to SEQ ID NO: 1378
  misc_feature 1..645: note = 20H5.A3-VH6VL4 light chain DNA sequence
  source 1..645: mol_type = other DNA

SEQ ID NO: 1394 - DNA, 645 bp, synthetic construct; identical to SEQ ID NO: 1379
  misc_feature 1..645: note = 20H5.A3-VH6VL5 light chain DNA sequence
  source 1..645: mol_type = other DNA

SEQ ID NO: 1395 - DNA, 645 bp, synthetic construct; identical to SEQ ID NO: 1378
  misc_feature 1..645: note = 20H5.A3-VH6VL6 light chain DNA sequence
  source 1..645: mol_type = other DNA

SEQ ID NO: 1396 - DNA, 645 bp, synthetic construct; identical to SEQ ID NO: 919
  misc_feature 1..645: note = 20H5.A3-VH7VL1 light chain DNA sequence
  source 1..645: mol_type = other DNA

SEQ ID NO: 1397 - DNA, 645 bp, synthetic construct; identical to SEQ ID NO: 1376
  misc_feature 1..645: note = 20H5.A3-VH7VL2 light chain DNA sequence
  source 1..645: mol_type = other DNA

SEQ ID NO: 1398 - DNA, 645 bp, synthetic construct; identical to SEQ ID NO: 920
  misc_feature 1..645: note = 20H5.A3-VH7VL3 light chain DNA sequence
  source 1..645: mol_type = other DNA

SEQ ID NO: 1399 - DNA, 645 bp, synthetic construct; identical to SEQ ID NO: 1378
  misc_feature 1..645: note = 20H5.A3-VH7VL4 light chain DNA sequence
  source 1..645: mol_type = other DNA

SEQ ID NO: 1400 - DNA, 645 bp, synthetic construct; identical to SEQ ID NO: 1379
  misc_feature 1..645: note = 20H5.A3-VH7VL5 light chain DNA sequence
  source 1..645: mol_type = other DNA

SEQ ID NO: 1401 - DNA, 645 bp, synthetic construct; identical to SEQ ID NO: 1379
  misc_feature 1..645: note = 20H5.A3-VH7VL6 light chain DNA sequence
  source 1..645: mol_type = other DNA

SEQ ID NO: 1402 - DNA, 645 bp, synthetic construct; identical to SEQ ID NO: 919
  misc_feature 1..645: note = 20H5.A3_hVH3VL1-hIgG1 (KEMv2) light chain DNA sequence
  source 1..645: mol_type = other DNA

SEQ ID NO: 1403 - DNA, 645 bp, synthetic construct; identical to SEQ ID NO: 919
  misc_feature 1..645: note = 20H5.A3_hVH3VL1-hIgG1 (LALAPGv2) light chain DNA sequence
  source 1..645: mol_type = other DNA

SEQ ID NO: 1404 - DNA, 645 bp, synthetic construct; identical to SEQ ID NO: 919
  misc_feature 1..645: note = 20H5.A3_hVH3VL1-hIgG1 (REM) light chain DNA sequence
  source 1..645: mol_type = other DNA

SEQ ID NO: 1405 - DNA, 645 bp, synthetic construct; identical to SEQ ID NO: 919
  misc_feature 1..645: note = 20H5.A3_hVH5VL1-hIgG1 (KEMv2) light chain DNA sequence
  source 1..645: mol_type = other DNA

SEQ ID NO: 1406 - DNA, 645 bp, synthetic construct; identical to SEQ ID NO: 919
  misc_feature 1..645: note = 20H5.A3_hVH5VL1-hIgG1 (LALAPGv2) light chain DNA sequence
  source 1..645: mol_type = other DNA

SEQ ID NO: 1407 - DNA, 645 bp, synthetic construct; identical to SEQ ID NO: 919
  misc_feature 1..645: note = 20H5.A3_hVH5VL1-hIgG1 (REM) light chain DNA sequence
  source 1..645: mol_type = other DNA

SEQ ID NO: 1408 - DNA, 645 bp, synthetic construct; identical to SEQ ID NO: 919
  misc_feature 1..645: note = 20H5.A3_hVH6VL1-hIgG1 (KEMv2) light chain DNA sequence
  source 1..645: mol_type = other DNA

SEQ ID NO: 1409 - DNA, 645 bp, synthetic construct; identical to SEQ ID NO: 919
  misc_feature 1..645: note = 20H5.A3_hVH6VL1-hIgG1 (LALAPGv2) light chain DNA sequence
  source 1..645: mol_type = other DNA

SEQ ID NO: 1410 - DNA, 645 bp, synthetic construct; identical to SEQ ID NO: 919
  misc_feature 1..645: note = 20H5.A3_hVH6VL1-hIgG1 (REM) light chain DNA sequence
  source 1..645: mol_type = other DNA

SEQ ID NO: 1411 - protein, 440 aa, synthetic construct
  REGION 1..440: note = F847C.21H6 heavy chain peptide sequence
QIQLVQSGPELKKPGETVKISCKASGYTFTIFGMNWVKQAPGKGLKWMGWVNTYTGEPTYADDFKGRFAFSLETSASTAYLQINNLKNEDTATYFCARGWFAYWGQGTLVTVSAASTKGPSVFPLAPCSRSTSESTAALGCLVKDYFPEPVTVSWNSGALTSGVHTFPAVLQSSGLYSLSSVVTVPSSSLGTKTYTCNVDHKPSNTKVDKRVESKYGPPCPPCPAPEFLGGPSVFLFPPKPKDTLMISRTPEVTCVVVDVSQEDPEVQFNWYVDGVEVHNAKTKPREEQFNSTYRVVSVLTVLHQDWLNGKEYKCKVSNKGLPSSIEKTISKAKGQPREPQVYTLPPSQEEMTKNQVSLTCLVKGFYPSDIAVEWESNGQPENNYKTTPPVLDSDGSFFLYSRLTVDKSRWQEGNVFSCSVMHEALHNHYTQKSLSLSLG

SEQ ID NO: 1412 - protein, 219 aa, synthetic construct
  REGION 1..219: note = F847C.21H6 light chain peptide sequence
DVVMTQTPLTLSVTIGQPASISCKSSRSLLDSDGKTYLNWLLQRPGQSPKRLIYLVSKLDSGVPDRFTGSGSGTDFTLKISRVEAEDLGVYYCWQGTHFPQTFGGGTKLEINRTVAAPSVFIFPPSDEQLKSGTASVVCLLNNFYPREAKVQWKVDNALQSGNSQESVTEQDSKDSTYSLSSTLTLSKADYEKHKVYACEVTHQGLSSPVTKSFNRGEC

SEQ ID NO: 1413 - DNA, 1326 bp, synthetic construct
  misc_feature 1..1326: note = F847C.21H6 heavy chain DNA sequence
  source 1..1326: mol_type = other DNA
cagatccagttggtgcagtctggacctgagctgaagaagcctggagagacagtcaagatctcctgcaaggcttctgggtataccttcacaatctttggaatgaactgggtgaagcaggctccaggaaagggtttaaagtggatgggctgggtaaacacctacactggagagccaacatatgctgatgacttcaagggacggtttgccttctctttggaaacctctgccagcactgcctatttgcagatcaacaacctcaaaaatgaggacacggctacatatttctgtgcaagaggctggtttgcttactggggccaagggactctggtcactgtctctgcagctagcaccaagggccccagcgtgtttcctctcgctccctgcagccggagcacatccgagagcaccgctgctctgggctgtctcgtgaaggactacttccctgaacccgtcaccgtcagctggaatagcggcgccctgacatccggcgtccacacattccccgctgtcctgcagagcagcggcctgtacagcctgagctccgtggtcaccgtgcctagcagcagcctgggaacaaagacctacacctgcaacgtggaccataagccctccaacaccaaggtggacaagcgggtggaatccaagtatggacccccctgtcctccttgccctgctcctgaatttctcggaggcccctccgtcttcctgtttccccccaagcccaaggacaccctgatgatctcccggacacccgaagtcacctgcgtcgtggtggatgtcagccaggaagatcccgaggtgcagttcaactggtacgtggacggagtggaggtgcataacgccaaaaccaagcccagggaagagcagttcaacagcacctatcgggtcgtgtccgtgctcaccgtcctgcatcaggattggctcaacggcaaggagtacaagtgcaaggtgtccaacaagggcctgccctcctccatcgagaagaccatctccaaggctaagggccaacctcgggagccccaagtgtataccctccctcccagccaggaggagatgaccaagaatcaagtgagcctgacctgcctcgtgaagggattttacccctccgacatcgctgtggaatgggaaagcaatggccaacctgagaacaactacaagaccacaccccccgtgctggactccgatggctccttcttcctgtacagcaggctgaccgtggacaaatcccggtggcaagagggaaacgtgttcagctgctccgtgatgcacgaggctctccacaaccactacacccagaagagcctctccctgagcctcggctagtaa

SEQ ID NO: 1414 - DNA, 661 bp, synthetic construct
  misc_feature 1..661: note = F847C.21H6 light chain DNA sequence
  source 1..661: mol_type = other DNA
gatgttgtgatgacccagactccactcactttgtcggttaccattggacaaccagcctccatctcttgcaagtcaagtcggagcctcttagatagtgatggaaagacatatttgaattggttgttacagaggccaggccagtctccaaagcgcctaatctatctggtgtccaaactggactctggagtccctgacaggttcactggcagtggatcagggacagatttcacactgaaaatcagcagagtggaggctgaggatttgggagtttattattgctggcaaggtacacattttcctcagacgttcggtggaggcaccaagctggaaatcaataggaccgtggccgcccccagcgtgttcatcttccctcccagcgacgagcagctgaagtctggcaccgccagcgtggtgtgcctgctgaacaacttctacccccgcgaggccaaggtgcagtggaaggtggacaacgccctgcagagcggcaacagccaggagagcgtgaccgagcaggactccaaggacagcacctacagcctgagcagcaccctgaccctgagcaaggccgactacgagaagcacaaggtgtacgcctgcgaggtgacccaccagggactgtctagccccgtgaccaagagcttcaaccggggcgagtgctaag

SEQ ID NO: 1415 - protein, 114 aa, synthetic construct; identical to SEQ ID NO: 367
  REGION 1..114: note = VH-152 Peptide Sequence

SEQ ID NO: 1416 - protein, 114 aa, synthetic construct
  REGION 1..114: note = VH-153 Peptide Sequence
QVQLVQSGSELKKPGASVKVSCKASGYTFTIFGMNWVRQAPGQGLEWMGWVNTYTGEPTYAQGFTGRFVFSLDTSVSTAYLQISSLKAEDTAVYYCARGWFAYWGQGTLVTVSS

SEQ ID NO: 1417 - protein, 114 aa, synthetic construct; identical to SEQ ID NO: 1416
  REGION 1..114: note = VH-154 Peptide Sequence

SEQ ID NO: 1418 - protein, 114 aa, synthetic construct; identical to SEQ ID NO: 1416
  REGION 1..114: note = VH-155 Peptide Sequence

SEQ ID NO: 1419 - protein, 114 aa, synthetic construct; identical to SEQ ID NO: 1416
  REGION 1..114: note = VH-156 Peptide Sequence

SEQ ID NO: 1420 - protein, 114 aa, synthetic construct
  REGION 1..114: note = VH-157 Peptide Sequence
QIQLVQSGSELKKPGASVKVSCKASGYTFTIFGMNWVRQAPGQGLEWMGWVNTYTGEPTYAQGFTGRFVFSLDTSVSTAYLQISSLKAEDTAVYFCARGWFAYWGQGTLVTVSS

SEQ ID NO: 1421 - protein, 114 aa, synthetic construct; identical to SEQ ID NO: 1420
  REGION 1..114: note = VH-158 Peptide Sequence

SEQ ID NO: 1422 - protein, 114 aa, synthetic construct; identical to SEQ ID NO: 1420
  REGION 1..114: note = VH-159 Peptide Sequence

SEQ ID NO: 1423 - protein, 114 aa, synthetic construct; identical to SEQ ID NO: 1420
  REGION 1..114: note = VH-160 Peptide Sequence

SEQ ID NO: 1424 - protein, 114 aa, synthetic construct
  REGION 1..114: note = VH-161 Peptide Sequence
QIQLVQSGSELKKPGASVKVSCKASGYTFTIFGMNWVRQAPGQGLEWMGWVNTYTGEPTYADDFTGRFVFSLDTSVSTAYLQISSLKAEDTAVYFCARGWFAYWGQGTLVTVSS

SEQ ID NO: 1425 - protein, 114 aa, synthetic construct; identical to SEQ ID NO: 1424
  REGION 1..114: note = VH-162 Peptide Sequence

SEQ ID NO: 1426 - protein, 114 aa, synthetic construct; identical to SEQ ID NO: 1424
  REGION 1..114: note = VH-163 Peptide Sequence

SEQ ID NO: 1427 - protein, 114 aa, synthetic construct; identical to SEQ ID NO: 1424
  REGION 1..114: note = VH-164 Peptide Sequence

SEQ ID NO: 1428 - protein, 114 aa, synthetic construct
  REGION 1..114: note = VH-165 Peptide Sequence
QVQLVQSGSELKKPGASVKVSCKASGYTFTIFGMNWVRQAPGQGLEWMGWVNTYTGEPTYAQGFTGRFVFSLDTSVSMAYLQISSLKAEDTAVYYCARGWFAYWGQGTLVTVSS

SEQ ID NO: 1429 - protein, 114 aa, synthetic construct; identical to SEQ ID NO: 1428
  REGION 1..114: note = VH-166 Peptide Sequence

SEQ ID NO: 1430 - protein, 114 aa, synthetic construct; identical to SEQ ID NO: 1428
  REGION 1..114: note = VH-167 Peptide Sequence

SEQ ID NO: 1431 - protein, 114 aa, synthetic construct; identical to SEQ ID NO: 1428
  REGION 1..114: note = VH-168 Peptide Sequence

SEQ ID NO: 1432 - protein, 114 aa, synthetic construct
  REGION 1..114: note = VH-169 Peptide Sequence
QIQLVQSGSELKKPGASVKVSCKASGYTFTIFGMNWVRQAPGQGLEWMGWVNTYTGEPTYAQGFTGRFVFSLDTSVSMAYLQISSLKAEDTAVYFCARGWFAYWGQGTLVTVSS

SEQ ID NO: 1433 - protein, 114 aa, synthetic construct; identical to SEQ ID NO: 1432
  REGION 1..114: note = VH-170 Peptide Sequence

SEQ ID NO: 1434 - protein, 114 aa, synthetic construct; identical to SEQ ID NO: 1432
  REGION 1..114: note = VH-171 Peptide Sequence

SEQ ID NO: 1435 - protein, 114 aa, synthetic construct; identical to SEQ ID NO: 1432
  REGION 1..114: note = VH-172 Peptide Sequence

SEQ ID NO: 1436 - protein, 114 aa, synthetic construct
  REGION 1..114: note = VH-173 Peptide Sequence
QIQLVQSGSELKKPGASVKVSCKASGYTFTIFGMNWVRQAPGQGLEWMGWVNTYTGEPTYADDFTGRFVFSLDTSVSMAYLQISSLKAEDTAVYFCARGWFAYWGQGTLVTVSS

SEQ ID NO: 1437 - protein, 114 aa, synthetic construct; identical to SEQ ID NO: 1436
  REGION 1..114: note = VH-174 Peptide Sequence

SEQ ID NO: 1438 - protein, 114 aa, synthetic construct; identical to SEQ ID NO: 1436
  REGION 1..114: note = VH-175 Peptide Sequence

SEQ ID NO: 1439 - protein, 114 aa, synthetic construct; identical to SEQ ID NO: 1436
  REGION 1..114: note = VH-176 Peptide Sequence

SEQ ID NO: 1440 - protein, 112 aa, synthetic construct; identical to SEQ ID NO: 440
  REGION 1..112: note = VL-150 Peptide Sequence

SEQ ID NO: 1441 - protein, 112 aa, synthetic construct
  REGION 1..112: note = VL-151 Peptide Sequence
DIVMTQTPLSLSVTPGQPASISCKSSRSLLDSDGKTYLNWYLQKPGQSPQRLIYLVSKLDSGVPDRFSGSGSGTDFTLKISRVEAEDVGVYYCWQGTHFPQTFGGGTKVEIK

SEQ ID NO: 1442 - protein, 112 aa, synthetic construct
  REGION 1..112: note = VL-152 Peptide Sequence
DVVMTQTPLSLSVTPGQPASISCKSSRSLLDSDGKTYLNWLLQKPGQSPQRLIYLVSKLDSGVPDRFSGSGSGTDFTLKISRVEAEDVGVYYCWQGTHFPQTFGGGTKVEIK

SEQ ID NO: 1443 - protein, 112 aa, synthetic construct
  REGION 1..112: note = VL-153 Peptide Sequence
DVVMTQSPLSLPVTLGQPASISCRSSRSLLDSDGKTYLNWFQQRPGQSPRRLIYLVSKLDSGVPDRFSGSGSGTDFTLKISRVEAEDVGVYYCWQGTHFPQTFGGGTKVEIK

SEQ ID NO: 1444 - protein, 112 aa, synthetic construct
  REGION 1..112: note = VL-154 Peptide Sequence
DVVMTQSPLSLPVTLGQPASISCKSSRSLLDSDGKTYLNWLQQRPGQSPRRLIYLVSKLDSGVPDRFSGSGSGTDFTLKISRVEAEDVGVYYCWQGTHFPQTFGGGTKVEIK

SEQ ID NO: 1445 - protein, 112 aa, synthetic construct; identical to SEQ ID NO: 1441
  REGION 1..112: note = VL-155 Peptide Sequence

SEQ ID NO: 1446 - protein, 112 aa, synthetic construct; identical to SEQ ID NO: 1442
  REGION 1..112: note = VL-156 Peptide Sequence

SEQ ID NO: 1447 - protein, 112 aa, synthetic construct; identical to SEQ ID NO: 1443
  REGION 1..112: note = VL-157 Peptide Sequence

SEQ ID NO: 1448 - protein, 112 aa, synthetic construct; identical to SEQ ID NO: 1444
  REGION 1..112: note = VL-158 Peptide Sequence

SEQ ID NO: 1449 - protein, 112 aa, synthetic construct; identical to SEQ ID NO: 1441
  REGION 1..112: note = VL-159 Peptide Sequence

SEQ ID NO: 1450 - protein, 112 aa, synthetic construct; identical to SEQ ID NO: 1442
  REGION 1..112: note = VL-160 Peptide Sequence

SEQ ID NO: 1451 - protein, 112 aa, synthetic construct; identical to SEQ ID NO: 1443
  REGION 1..112: note = VL-161 Peptide Sequence

SEQ ID NO: 1452 - protein, 112 aa, synthetic construct; identical to SEQ ID NO: 1441
  REGION 1..112: note = VL-162 Peptide Sequence

SEQ ID NO: 1453 - protein, 112 aa, synthetic construct; identical to SEQ ID NO: 1441
  REGION 1..112: note = VL-163 Peptide Sequence

SEQ ID NO: 1454 - protein, 112 aa, synthetic construct; identical to SEQ ID NO: 1442
  REGION 1..112: note = VL-164 Peptide Sequence

SEQ ID NO: 1455 - protein, 112 aa, synthetic construct; identical to SEQ ID NO: 1443
  REGION 1..112: note = VL-165 Peptide Sequence

SEQ ID NO: 1456 - protein, 112 aa, synthetic construct; identical to SEQ ID NO: 1444
  REGION 1..112: note = VL-166 Peptide Sequence

SEQ ID NO: 1457 - protein, 112 aa, synthetic construct; identical to SEQ ID NO: 1441
  REGION 1..112: note = VL-167 Peptide Sequence

SEQ ID NO: 1458 - protein, 112 aa, synthetic construct; identical to SEQ ID NO: 1442
  REGION 1..112: note = VL-168 Peptide Sequence

SEQ ID NO: 1459 - protein, 112 aa, synthetic construct; identical to SEQ ID NO: 1443
  REGION 1..112: note = VL-169 Peptide Sequence

SEQ ID NO: 1460 - protein, 112 aa, synthetic construct; identical to SEQ ID NO: 1444
  REGION 1..112: note = VL-170 Peptide Sequence

SEQ ID NO: 1461 - protein, 112 aa, synthetic construct; identical to SEQ ID NO: 1441
  REGION 1..112: note = VL-171 Peptide Sequence

SEQ ID NO: 1462 - protein, 112 aa, synthetic construct; identical to SEQ ID NO: 1442
  REGION 1..112: note = VL-172 Peptide Sequence

SEQ ID NO: 1463 - protein, 112 aa, synthetic construct; identical to SEQ ID NO: 1443
  REGION 1..112: note = VL-173 Peptide Sequence

SEQ ID NO: 1464 - protein, 112 aa, synthetic construct; identical to SEQ ID NO: 1444
  REGION 1..112: note = VL-174 Peptide Sequence

SEQ ID NO: 1465 - protein, 440 aa, synthetic construct; identical to SEQ ID NO: 1411
  REGION 1..440: note = 21H6-H0L0 heavy chain peptide sequence

SEQ ID NO: 1466 - protein, 440 aa, synthetic construct
  REGION 1..440: note = 21H6-H1L1 heavy chain peptide sequence
QVQLVQSGSELKKPGASVKVSCKASGYTFTIFGMNWVRQAPGQGLEWMGWVNTYTGEPTYAQGFTGRFVFSLDTSVSTAYLQISSLKAEDTAVYYCARGWFAYWGQGTLVTVSSASTKGPSVFPLAPCSRSTSESTAALGCLVKDYFPEPVTVSWNSGALTSGVHTFPAVLQSSGLYSLSSVVTVPSSSLGTKTYTCNVDHKPSNTKVDKRVESKYGPPCPPCPAPEFLGGPSVFLFPPKPKDTLMISRTPEVTCVVVDVSQEDPEVQFNWYVDGVEVHNAKTKPREEQFNSTYRVVSVLTVLHQDWLNGKEYKCKVSNKGLPSSIEKTISKAKGQPREPQVYTLPPSQEEMTKNQVSLTCLVKGFYPSDIAVEWESNGQPENNYKTTPPVLDSDGSFFLYSRLTVDKSRWQEGNVFSCSVMHEALHNHYTQKSLSLSLG

SEQ ID NO: 1467 - protein, 440 aa, synthetic construct; identical to SEQ ID NO: 1466
  REGION 1..440: note = 21H6-H1L2 heavy chain peptide sequence

SEQ ID NO: 1468 - protein, 440 aa, synthetic construct; identical to SEQ ID NO: 1466
  REGION 1..440: note = 21H6-H1L3 heavy chain peptide sequence

SEQ ID NO: 1469 - protein, 440 aa, synthetic construct; identical to SEQ ID NO: 1466
  REGION 1..440: note = 21H6-H1L4 heavy chain peptide sequence

SEQ ID NO: 1470 - protein, 440 aa, synthetic construct
  REGION 1..440: note = 21H6-H2L1 heavy chain peptide sequence
QIQLVQSGSELKKPGASVKVSCKASGYTFTIFGMNWVRQAPGQGLEWMGWVNTYTGEPTYAQGFTGRFVFSLDTSVSTAYLQISSLKAEDTAVYFCARGWFAYWGQGTLVTVSSASTKGPSVFPLAPCSRSTSESTAALGCLVKDYFPEPVTVSWNSGALTSGVHTFPAVLQSSGLYSLSSVVTVPSSSLGTKTYTCNVDHKPSNTKVDKRVESKYGPPCPPCPAPEFLGGPSVFLFPPKPKDTLMISRTPEVTCVVVDVSQEDPEVQFNWYVDGVEVHNAKTKPREEQFNSTYRVVSVLTVLHQDWLNGKEYKCKVSNKGLPSSIEKTISKAKGQPREPQVYTLPPSQEEMTKNQVSLTCLVKGFYPSDIAVEWESNGQPENNYKTTPPVLDSDGSFFLYSRLTVDKSRWQEGNVFSCSVMHEALHNHYTQKSLSLSLG

SEQ ID NO: 1471 - protein, 440 aa, synthetic construct; identical to SEQ ID NO: 1470
  REGION 1..440: note = 21H6-H2L2 heavy chain peptide sequence

SEQ ID NO: 1472 - protein, 440 aa, synthetic construct; identical to SEQ ID NO: 1470
  REGION 1..440: note = 21H6-H2L3 heavy chain peptide sequence

SEQ ID NO: 1473 - protein, 440 aa, synthetic construct; identical to SEQ ID NO: 1470
  REGION 1..440: note = 21H6-H2L4 heavy chain peptide sequence

SEQ ID NO: 1474 - protein, 440 aa, synthetic construct
  REGION 1..440: note = 21H6-H3L1 heavy chain peptide sequence
QIQLVQSGSELKKPGASVKVSCKASGYTFTIFGMNWVRQAPGQGLEWMGWVNTYTGEPTYADDFTGRFVFSLDTSVSTAYLQISSLKAEDTAVYFCARGWFAYWGQGTLVTVSSASTKGPSVFPLAPCSRSTSESTAALGCLVKDYFPEPVTVSWNSGALTSGVHTFPAVLQSSGLYSLSSVVTVPSSSLGTKTYTCNVDHKPSNTKVDKRVESKYGPPCPPCPAPEFLGGPSVFLFPPKPKDTLMISRTPEVTCVVVDVSQEDPEVQFNWYVDGVEVHNAKTKPREEQFNSTYRVVSVLTVLHQDWLNGKEYKCKVSNKGLPSSIEKTISKAKGQPREPQVYTLPPSQEEMTKNQVSLTCLVKGFYPSDIAVEWESNGQPENNYKTTPPVLDSDGSFFLYSRLTVDKSRWQEGNVFSCSVMHEALHNHYTQKSLSLSLG

SEQ ID NO: 1475 - protein, 440 aa, synthetic construct; identical to SEQ ID NO: 1474
  REGION 1..440: note = 21H6-H3L2 heavy chain peptide sequence

SEQ ID NO: 1476 - protein, 440 aa, synthetic construct; identical to SEQ ID NO: 1474
  REGION 1..440: note = 21H6-H3L3 heavy chain peptide sequence

SEQ ID NO: 1477 - protein, 440 aa, synthetic construct; identical to SEQ ID NO: 1474
  REGION 1..440: note = 21H6-H3L4 heavy chain peptide sequence

SEQ ID NO: 1478 - protein, 440 aa, synthetic construct
  REGION 1..440: note = 21H6-H4L1 heavy chain peptide sequence
QVQLVQSGSELKKPGASVKVSCKASGYTFTIFGMNWVRQAPGQGLEWMGWVNTYTGEPTYAQGFTGRFVFSLDTSVSMAYLQISSLKAEDTAVYYCARGWFAYWGQGTLVTVSSASTKGPSVFPLAPCSRSTSESTAALGCLVKDYFPEPVTVSWNSGALTSGVHTFPAVLQSSGLYSLSSVVTVPSSSLGTKTYTCNVDHKPSNTKVDKRVESKYGPPCPPCPAPEFLGGPSVFLFPPKPKDTLMISRTPEVTCVVVDVSQEDPEVQFNWYVDGVEVHNAKTKPREEQFNSTYRVVSVLTVLHQDWLNGKEYKCKVSNKGLPSSIEKTISKAKGQPREPQVYTLPPSQEEMTKNQVSLTCLVKGFYPSDIAVEWESNGQPENNYKTTPPVLDSDGSFFLYSRLTVDKSRWQEGNVFSCSVMHEALHNHYTQKSLSLSLG

SEQ ID NO: 1479 - protein, 440 aa, synthetic construct; identical to SEQ ID NO: 1478
  REGION 1..440: note = 21H6-H4L2 heavy chain peptide sequence

SEQ ID NO: 1480 - protein, 440 aa, synthetic construct; identical to SEQ ID NO: 1478
  REGION 1..440: note = 21H6-H4L3 heavy chain peptide sequence

SEQ ID NO: 1481 - protein, 440 aa, synthetic construct; identical to SEQ ID NO: 1478
  REGION 1..440: note = 21H6-H4L4 heavy chain peptide sequence

SEQ ID NO: 1482 - protein, 440 aa, synthetic construct
  REGION 1..440: note = 21H6-H5L1 heavy chain peptide sequence
QIQLVQSGSELKKPGASVKVSCKASGYTFTIFGMNWVRQAPGQGLEWMGWVNTYTGEPTYAQGFTGRFVFSLDTSVSMAYLQISSLKAEDTAVYFCARGWFAYWGQGTLVTVSSASTKGPSVFPLAPCSRSTSESTAALGCLVKDYFPEPVTVSWNSGALTSGVHTFPAVLQSSGLYSLSSVVTVPSSSLGTKTYTCNVDHKPSNTKVDKRVESKYGPPCPPCPAPEFLGGPSVFLFPPKPKDTLMISRTPEVTCVVVDVSQEDPEVQFNWYVDGVEVHNAKTKPREEQFNSTYRVVSVLTVLHQDWLNGKEYKCKVSNKGLPSSIEKTISKAKGQPREPQVYTLPPSQEEMTKNQVSLTCLVKGFYPSDIAVEWESNGQPENNYKTTPPVLDSDGSFFLYSRLTVDKSRWQEGNVFSCSVMHEALHNHYTQKSLSLSLG

SEQ ID NO: 1483 - protein, 440 aa, synthetic construct; identical to SEQ ID NO: 1482
  REGION 1..440: note = 21H6-H5L2 heavy chain peptide sequence

SEQ ID NO: 1484 - protein, 440 aa, synthetic construct; identical to SEQ ID NO: 1482
  REGION 1..440: note = 21H6-H5L3 heavy chain peptide sequence

SEQ ID NO: 1485 - protein, 440 aa, synthetic construct; identical to SEQ ID NO: 1482
  REGION 1..440: note = 21H6-H5L4 heavy chain peptide sequence

SEQ ID NO: 1486 - protein, 440 aa, synthetic construct
  REGION 1..440: note = 21H6-H6L1 heavy chain peptide sequence
QIQLVQSGSELKKPGASVKVSCKASGYTFTIFGMNWVRQAPGQGLEWMGWVNTYTGEPTYADDFTGRFVFSLDTSVSMAYLQISSLKAEDTAVYFCARGWFAYWGQGTLVTVSSASTKGPSVFPLAPCSRSTSESTAALGCLVKDYFPEPVTVSWNSGALTSGVHTFPAVLQSSGLYSLSSVVTVPSSSLGTKTYTCNVDHKPSNTKVDKRVESKYGPPCPPCPAPEFLGGPSVFLFPPKPKDTLMISRTPEVTCVVVDVSQEDPEVQFNWYVDGVEVHNAKTKPREEQFNSTYRVVSVLTVLHQDWLNGKEYKCKVSNKGLPSSIEKTISKAKGQPREPQVYTLPPSQEEMTKNQVSLTCLVKGFYPSDIAVEWESNGQPENNYKTTPPVLDSDGSFFLYSRLTVDKSRWQEGNVFSCSVMHEALHNHYTQKSLSLSLG

SEQ ID NO: 1487 - protein, 440 aa, synthetic construct; identical to SEQ ID NO: 1486
  REGION 1..440: note = 21H6-H6L2 heavy chain peptide sequence

SEQ ID NO: 1488 - protein, 440 aa, synthetic construct; identical to SEQ ID NO: 1486
  REGION 1..440: note = 21H6-H6L3 heavy chain peptide sequence

SEQ ID NO: 1489 - protein, 440 aa, synthetic construct; identical to SEQ ID NO: 1486
  REGION 1..440: note = 21H6-H6L4 heavy chain peptide sequence

SEQ ID NO: 1490 - protein, 219 aa, synthetic construct; identical to SEQ ID NO: 1412
  REGION 1..219: note = 21H6-H0L0 light chain peptide sequence

SEQ ID NO: 1491 - protein, 219 aa, synthetic construct
  REGION 1..219: note = 21H6-H1L1 light chain peptide sequence
DIVMTQTPLSLSVTPGQPASISCKSSRSLLDSDGKTYLNWYLQKPGQSPQRLIYLVSKLDSGVPDRFSGSGSGTDFTLKISRVEAEDVGVYYCWQGTHFPQTFGGGTKVEIKRTVAAPSVFIFPPSDEQLKSGTASVVCLLNNFYPREAKVQWKVDNALQSGNSQESVTEQDSKDSTYSLSSTLTLSKADYEKHKVYACEVTHQGLSSPVTKSFNRGEC

SEQ ID NO: 1492 - protein, 219 aa, synthetic construct
  REGION 1..219: note = 21H6-H1L2 light chain peptide sequence
DVVMTQTPLSLSVTPGQPASISCKSSRSLLDSDGKTYLNWLLQKPGQSPQRLIYLVSKLDSGVPDRFSGSGSGTDFTLKISRVEAEDVGVYYCWQGTHFPQTFGGGTKVEIKRTVAAPSVFIFPPSDEQLKSGTASVVCLLNNFYPREAKVQWKVDNALQSGNSQESVTEQDSKDSTYSLSSTLTLSKADYEKHKVYACEVTHQGLSSPVTKSFNRGEC

SEQ ID NO: 1493 - protein, 219 aa, synthetic construct
  REGION 1..219: note = 21H6-H1L3 light chain peptide sequence
DVVMTQSPLSLPVTLGQPASISCRSSRSLLDSDGKTYLNWFQQRPGQSPRRLIYLVSKLDSGVPDRFSGSGSGTDFTLKISRVEAEDVGVYYCWQGTHFPQTFGGGTKVEIKRTVAAPSVFIFPPSDEQLKSGTASVVCLLNNFYPREAKVQWKVDNALQSGNSQESVTEQDSKDSTYSLSSTLTLSKADYEKHKVYACEVTHQGLSSPVTKSFNRGEC

SEQ ID NO: 1494 - protein, 219 aa, synthetic construct
  REGION 1..219: note = 21H6-H1L4 light chain peptide sequence
DVVMTQSPLSLPVTLGQPASISCKSSRSLLDSDGKTYLNWLQQRPGQSPRRLIYLVSKLDSGVPDRFSGSGSGTDFTLKISRVEAEDVGVYYCWQGTHFPQTFGGGTKVEIKRTVAAPSVFIFPPSDEQLKSGTASVVCLLNNFYPREAKVQWKVDNALQSGNSQESVTEQDSKDSTYSLSSTLTLSKADYEKHKVYACEVTHQGLSSPVTKSFNRGEC

SEQ ID NO: 1495 - protein, 219 aa, synthetic construct; identical to SEQ ID NO: 1491
  REGION 1..219: note = 21H6-H2L1 light chain peptide sequence

SEQ ID NO: 1496 - protein, 219 aa, synthetic construct; identical to SEQ ID NO: 1492
  REGION 1..219: note = 21H6-H2L2 light chain peptide sequence

SEQ ID NO: 1497 - protein, 219 aa, synthetic construct; identical to SEQ ID NO: 1493
  REGION 1..219: note = 21H6-H2L3 light chain peptide sequence

SEQ ID NO: 1498 - protein, 219 aa, synthetic construct; identical to SEQ ID NO: 1494
  REGION 1..219: note = 21H6-H2L4 light chain peptide sequence

SEQ ID NO: 1499 - protein, 219 aa, synthetic construct; identical to SEQ ID NO: 1491
  REGION 1..219: note = 21H6-H3L1 light chain peptide sequence

SEQ ID NO: 1500 - protein, 219 aa, synthetic construct; identical to SEQ ID NO: 1492
  REGION 1..219: note = 21H6-H3L2 light chain peptide sequence

SEQ ID NO: 1501 - protein, 219 aa, synthetic construct; identical to SEQ ID NO: 1493
  REGION 1..219: note = 21H6-H3L3 light chain peptide sequence

SEQ ID NO: 1502 - protein, 219 aa, synthetic construct; identical to SEQ ID NO: 1491
  REGION 1..219: note = 21H6-H3L4 light chain peptide sequence

SEQ ID NO: 1503 - protein, 219 aa, synthetic construct; identical to SEQ ID NO: 1491
  REGION 1..219: note = 21H6-H4L1 light chain peptide sequence

SEQ ID NO: 1504 - protein, 219 aa, synthetic construct; identical to SEQ ID NO: 1492
  REGION 1..219: note = 21H6-H4L2 light chain peptide sequence

SEQ ID NO: 1505 - protein, 219 aa, synthetic construct; identical to SEQ ID NO: 1493
  REGION 1..219: note = 21H6-H4L3 light chain peptide sequence

SEQ ID NO: 1506 - protein, 219 aa, synthetic construct; identical to SEQ ID NO: 1494
  REGION 1..219: note = 21H6-H4L4 light chain peptide sequence

SEQ ID NO: 1507 - protein, 219 aa, synthetic construct; identical to SEQ ID NO: 1491
  REGION 1..219: note = 21H6-H5L1 light chain peptide sequence

SEQ ID NO: 1508 - protein, 219 aa, synthetic construct; identical to SEQ ID NO: 1492
  REGION 1..219: note = 21H6-H5L2 light chain peptide sequence

SEQ ID NO: 1509 - protein, 219 aa, synthetic construct; identical to SEQ ID NO: 1493
  REGION 1..219: note = 21H6-H5L3 light chain peptide sequence

SEQ ID NO: 1510 - protein, 219 aa, synthetic construct; identical to SEQ ID NO: 1494
  REGION 1..219: note = 21H6-H5L4 light chain peptide sequence

SEQ ID NO: 1511 - protein, 219 aa, synthetic construct; identical to SEQ ID NO: 1491
  REGION 1..219: note = 21H6-H6L1 light chain peptide sequence

SEQ ID NO: 1512 - protein, 219 aa, synthetic construct; identical to SEQ ID NO: 1492
  REGION 1..219: note = 21H6-H6L2 light chain peptide sequence

SEQ ID NO: 1513 - protein, 219 aa, synthetic construct; identical to SEQ ID NO: 1493
  REGION 1..219: note = 21H6-H6L3 light chain peptide sequence

SEQ ID NO: 1514 - protein, 219 aa, synthetic construct; identical to SEQ ID NO: 1494
  REGION 1..219: note = 21H6-H6L4 light chain peptide sequence

SEQ ID NO: 1515 - DNA, 342 bp, synthetic construct
  misc_feature 1..342: note = 21H6-H0L0 VH DNA sequence
  source 1..342: mol_type = other DNA
cagatccagcttgtacagtctgggcctgaacttaaaaagcccggggaaacagtgaagatctcctgtaaggcttctgggtacacttttacgatctttggaatgaactgggtcaagcaggctcccggaaaaggtctgaagtggatgggctgggtgaatacatacacgggggaacccacctatgctgacgattttaaggggcggttcgctttctctctcgaaaccagcgcgagtacagcatacttacagatcaacaacttgaagaacgaagatacagctacgtatttctgtgctagagggtggttcgcgtattgggggcaaggcactctcgtcaccgtatccgcc

SEQ ID NO: 1516 - DNA, 342 bp, synthetic construct
  misc_feature 1..342: note = 21H6-H1L1 VH DNA sequence
  source 1..342: mol_type = other DNA
caggtgcagctcgtacaaagcgggtcagagttaaagaagcctggggccagtgtgaaagtcagttgcaaagcgtccggttacactttcacaatcttcggaatgaactgggtgcgccaggctcccggccaaggattggagtggatgggatgggtcaatacatacaccggcgagcctacttatgcccagggttttaccgggaggtttgtgttctccttagatacatccgtgagtacggcttatctgcaaatctcttctctcaaggcggaagacactgcggtatattactgtgcgcggggatggttcgcatactggggacaaggcaccctcgtgaccgtgagcagc

SEQ ID NO: 1517 - DNA, 342 bp, synthetic construct; identical to SEQ ID NO: 1516
  misc_feature 1..342: note = 21H6-H1L2 VH DNA sequence
  source 1..342: mol_type = other DNA

SEQ ID NO: 1518 - DNA, 342 bp, synthetic construct; identical to SEQ ID NO: 1516
  misc_feature 1..342: note = 21H6-H1L3 VH DNA sequence
  source 1..342: mol_type = other DNA

SEQ ID NO: 1519 - DNA, 342 bp, synthetic construct; identical to SEQ ID NO: 1516
  misc_feature 1..342: note = 21H6-H1L4 VH DNA sequence
  source 1..342: mol_type = other DNA

SEQ ID NO: 1520 - DNA, 342 bp, synthetic construct
  misc_feature 1..342: note = 21H6-H2L1 VH DNA sequence
  source 1..342: mol_type = other DNA
cagatccagcttgtccagtctggatccgagttaaaaaaacctggcgccagcgttaaggtttcctgcaaagcaagtggttacacgtttacaatcttcggaatgaattgggtgcgtcaagctcccggacaaggactcgaatggatgggatgggtgaacacatacacgggcgagcctacctacgctcagggcttcacaggccgatttgtgttctccctggacacgagcgtctccactgcatatttgcaaatatccagtcttaaggcagaggacaccgctgtgtatttttgtgcacgagggtggtttgcctattggggccagggaacactggttactgtctcaagt

SEQ ID NO: 1521 - DNA, 342 bp, synthetic construct; identical to SEQ ID NO: 1520
  misc_feature 1..342: note = 21H6-H2L2 VH DNA sequence
  source 1..342: mol_type = other DNA

SEQ ID NO: 1522 - DNA, 342 bp, synthetic construct; identical to SEQ ID NO: 1520
  misc_feature 1..342: note = 21H6-H2L3 VH DNA sequence
  source 1..342: mol_type = other DNA

SEQ ID NO: 1523 - DNA, 342 bp, synthetic construct; identical to SEQ ID NO: 1520
  misc_feature 1..342: note = 21H6-H2L4 VH DNA sequence
  source 1..342: mol_type = other DNA

SEQ ID NO: 1524 - DNA, 342 bp, synthetic construct
  misc_feature 1..342: note = 21H6-H3L1 VH DNA sequence
  source 1..342: mol_type = other DNA
cagattcagctggtgcagagcggctcagaacttaagaagcccggcgccagtgtgaaagtgagttgtaaggccagcggatacactttcactatctttggcatgaattgggtgcggcaggcccccggtcagggactggagtggatggggtgggtgaatacatacactggagaacctacctacgcggacgacttcacaggacggttcgtcttctccttagacacctctgtcagcacagcttacctccagattagttccctgaaggctgaagatacggcagtatacttttgcgctagaggctggtttgcctactgggggcagggtacgcttgtgacagtgtcttct

SEQ ID NO: 1525 - DNA, 342 bp, synthetic construct; identical to SEQ ID NO: 1524
  misc_feature 1..342: note = 21H6-H3L2 VH DNA sequence
  source 1..342: mol_type = other DNA

SEQ ID NO: 1526 - DNA, 342 bp, synthetic construct; identical to SEQ ID NO: 1524
  misc_feature 1..342: note = 21H6-H3L3 VH DNA sequence
  source 1..342: mol_type = other DNA

SEQ ID NO: 1527 - DNA, 342 bp, synthetic construct; identical to SEQ ID NO: 1524
  misc_feature 1..342: note = 21H6-H3L4 VH DNA sequence
  source 1..342: mol_type = other DNA

SEQ ID NO: 1528 - DNA, 342 bp, synthetic construct
  misc_feature 1..342: note = 21H6-H4L1 VH DNA sequence
  source 1..342: mol_type = other DNA
caggtgcaactcgtccagtcagggtccgagctgaagaaacccggagcgtccgtgaaggtgtcctgtaaagcctctggctacacattcaccatattcgggatgaactgggtgcgtcaggccccagggcagggattagagtggatgggttgggtgaacacctacacaggggagccaacttacgcccaggggttcacgggcagatttgtatttagcctcgacacctccgtttcaatggcctatctccagatttcaagccttaaagctgaggacactgctgtgtactactgcgcccgcggttggtttgcatactggggccagggaacccttgtcaccgtgtcttcc

SEQ ID NO: 1529 - DNA, 342 bp, synthetic construct; identical to SEQ ID NO: 1528
  misc_feature 1..342: note = 21H6-H4L2 VH DNA sequence
  source 1..342: mol_type = other DNA

SEQ ID NO: 1530 - DNA, 342 bp, synthetic construct; identical to SEQ ID NO: 1528
  misc_feature 1..342: note = 21H6-H4L3 VH DNA sequence
  source 1..342: mol_type = other DNA

SEQ ID NO: 1531 - DNA, 342 bp, synthetic construct; identical to SEQ ID NO: 1528
  misc_feature 1..342: note = 21H6-H4L4 VH DNA sequence
  source 1..342: mol_type = other DNA

SEQ ID NO: 1532 - DNA, 342 bp, synthetic construct
  misc_feature 1..342: note = 21H6-H5L1 VH DNA sequence
  source 1..342: mol_type = other DNA
cagatccagttggtccagtccggaagtgagctgaagaagcctggtgccagtgtcaaagtttcctgcaaagcctctggatataccttcaccattttcggtatgaactgggtccgacaagctccggggcaggggctcgaatggatggggtgggtgaatacatacacaggcgaaccaacatacgcacagggatttacaggtcggttcgtcttttccctggacacatctgtttccatggcctatctgcagatctctagcctgaaggctgaagataccgccgtatatttctgtgcacgggggtggttcgcctactgggggcagggcacccttgtgactgtgtctagc

SEQ ID NO: 1533 - DNA, 342 bp, synthetic construct; identical to SEQ ID NO: 1532
  misc_feature 1..342: note = 21H6-H5L2 VH DNA sequence
  source 1..342: mol_type = other DNA

SEQ ID NO: 1534 - DNA, 342 bp, synthetic construct; identical to SEQ ID NO: 1532
  misc_feature 1..342: note = 21H6-H5L3 VH DNA sequence
  source 1..342: mol_type = other DNA

SEQ ID NO: 1535 - DNA, 342 bp, synthetic construct; identical to SEQ ID NO: 1532
  misc_feature 1..342: note = 21H6-H5L4 VH DNA sequence
  source 1..342: mol_type = other DNA

SEQ ID NO: 1536 - DNA, 342 bp, synthetic construct
  misc_feature 1..342: note = 21H6-H6L1 VH DNA sequence
  source 1..342: mol_type = other DNA
cagatccagctggtccagagtggctccgagctgaaaaagcctggagcttctgtgaaagtctcctgcaaagcttctggctacacatttactatctttgggatgaactgggtaaggcaggccccaggccaaggactggagtggatgggctgggttaatacctacacaggcgagcccacgtacgctgacgacttcacagggaggtttgtgttttccctggatacctccgttagcatggcctatttgcagattagttccctgaaggcagaggatactgccgtgtacttttgtgcacgaggatggtttgcctattggggccagggtaccttggtgaccgtctccagc

SEQ ID NO: 1537 - DNA, 342 bp, synthetic construct; identical to SEQ ID NO: 1536
  misc_feature 1..342: note = 21H6-H6L2 VH DNA sequence
  source 1..342: mol_type = other DNA

SEQ ID NO: 1538 - DNA, 342 bp, synthetic construct; identical to SEQ ID NO: 1536
  misc_feature 1..342: note = 21H6-H6L3 VH DNA sequence
  source 1..342: mol_type = other DNA

SEQ ID NO: 1539 - DNA, 342 bp, synthetic construct; identical to SEQ ID NO: 1536
  misc_feature 1..342: note = 21H6-H6L4 VH DNA sequence
  source 1..342: mol_type = other DNA

SEQ ID NO: 1540 - DNA, 336 bp, synthetic construct
  misc_feature 1..336: note = 21H6-H0L0 VL DNA sequence
  source 1..336: mol_type = other DNA
gatgtcgttatgactcagaccccactcacgctctcagtgaccatcggacagcctgccagcatctcatgtaaaagtagtcgcagcctgttagattctgacggcaagacctatctgaactggctgctgcagcgtcctggccagagcccaaaaaggctgatctatctcgtctcaaagctggattcaggagtccccgatcggtttacgggtagcggatctggcaccgacttcacactgaagatttctcgggttgaagccgaagatttgggcgtctactattgctggcaaggaacacacttccctcagacctttggcggcggcacaaagctggaaattaat

SEQ ID NO: 1541 - DNA, 336 bp, synthetic construct
  misc_feature 1..336: note = 21H6-H1L1 VL DNA sequence
  source 1..336: mol_type = other DNA
gatatagtgatgacacagacccccctgtctctctcagttacccccggacaacccgcctctatcagttgcaagagtagtcgctctctgctcgattccgacggaaagacttatctgaattggtatttacaaaaacctgggcagagtccccagcgccttatatatctcgtgtccaaactcgatagcggcgtgcctgaccggttcagcggttcaggctccgggaccgactttacactgaagattagtagggtcgaggcagaagacgtcggtgtttattactgttggcagggcacccatttccctcagacgtttggcggaggtaccaaggtagagataaag

SEQ ID NO: 1542 - DNA, 336 bp, synthetic construct
  misc_feature 1..336: note = 21H6-H1L2 VL DNA sequence
  source 1..336: mol_type = other DNA
gatgtggtgatgactcagactcctctgagcctgtccgtgaccccaggacaacctgcttccatttcctgtaaatcctcccgttccttattggatagcgacgggaagacatacctgaactggctgctgcagaaacccgggcagtccccgcagagattaatatatctggtatctaagctggatagtggtgtaccagatcggtttagcggatccggctcaggtaccgacttcacgctcaagatctccagggtggaggctgaggatgtaggagtatactactgttggcaggggacccattttcctcaaacatttggggggggaacaaaggtagagatcaag

SEQ ID NO: 1543 - DNA, 336 bp, synthetic construct
  misc_feature 1..336: note = 21H6-H1L3 VL DNA sequence
  source 1..336: mol_type = other DNA
gatgtggtgatgactcagtctccactcagcctgcctgtaaccttagggcaacctgcctccatcagttgtcgctccagtcgttctctgctggattcagacggtaaaacctatctgaattggttccagcagcgtccaggacagtctccacgccgactgatatatctcgtgagtaagttggattcaggcgtgcccgatcgcttcagtggcagcgggtctgggactgactttaccctgaaaatatcccgcgtggaggcggaagatgtcggggtatattactgttggcagggtacacatttcccacagacattcgggggaggcactaaggtggaaattaaa

SEQ ID NO: 1544 - DNA, 336 bp, synthetic construct
  misc_feature 1..336: note = 21H6-H1L4 VL DNA sequence
  source 1..336: mol_type = other DNA
gacgtggtgatgacacagagcccgctgtctctcccggtaacgctgggccagccggcgtctattagctgtaagagtagccgaagtctccttgatagcgacggaaaaacctatctgaactggcttcagcaacgccctgggcagtccccccgccgcctgatttatctggtgtccaaactggacagcggcgtgcccgacaggttctccgggagcggtagcggtactgactttacgctcaagatttcccgcgtggaggccgaggatgtcggggtatattactgctggcaggggacgcattttccgcagacctttggcggaggcaccaaagtggagatcaaa

SEQ ID NO: 1545 - DNA, 336 bp, synthetic construct; identical to SEQ ID NO: 1541
  misc_feature 1..336: note = 21H6-H2L1 VL DNA sequence
  source 1..336: mol_type = other DNA

SEQ ID NO: 1546 - DNA, 336 bp, synthetic construct; identical to SEQ ID NO: 1542
  misc_feature 1..336: note = 21H6-H2L2 VL DNA sequence
  source 1..336: mol_type = other DNA

SEQ ID NO: 1547 - DNA, 336 bp, synthetic construct; identical to SEQ ID NO: 1543
  misc_feature 1..336: note = 21H6-H2L3 VL DNA sequence
  source 1..336: mol_type = other DNA

SEQ ID NO: 1548 - DNA, 336 bp, synthetic construct; identical to SEQ ID NO: 1544
  misc_feature 1..336: note = 21H6-H2L4 VL DNA sequence
  source 1..336: mol_type = other DNA

SEQ ID NO: 1549 - DNA, 336 bp, synthetic construct; identical to SEQ ID NO: 1541
  misc_feature 1..336: note = 21H6-H3L1 VL DNA sequence
  source 1..336: mol_type = other DNA

SEQ ID NO: 1550 - DNA, 336 bp, synthetic construct; identical to SEQ ID NO: 1542
  misc_feature 1..336: note = 21H6-H3L2 VL DNA sequence
  source 1..336: mol_type = other DNA

SEQ ID NO: 1551 - DNA, 336 bp, synthetic construct; identical to SEQ ID NO: 1543
  misc_feature 1..336: note = 21H6-H3L3 VL DNA sequence
  source 1..336: mol_type = other DNA

SEQ ID NO: 1552 - DNA, 336 bp, synthetic construct; identical to SEQ ID NO: 1544
  misc_feature 1..336: note = 21H6-H3L4 VL DNA sequence
  source 1..336: mol_type = other DNA

SEQ ID NO: 1553 - DNA, 336 bp, synthetic construct; identical to SEQ ID NO: 1541
  misc_feature 1..336: note = 21H6-H4L1 VL DNA sequence
  source 1..336: mol_type = other DNA

SEQ ID NO: 1554 - DNA, 336 bp, synthetic construct; identical to SEQ ID NO: 1542
  misc_feature 1..336: note = 21H6-H4L2 VL DNA sequence
  source 1..336: mol_type = other DNA

SEQ ID NO: 1555 - DNA, 336 bp, synthetic construct; identical to SEQ ID NO: 1543
  misc_feature 1..336: note = 21H6-H4L3 VL DNA sequence
  source 1..336: mol_type = other DNA

SEQ ID NO: 1556 - DNA, 336 bp, synthetic construct; identical to SEQ ID NO: 1544
  misc_feature 1..336: note = 21H6-H4L4 VL DNA sequence
  source 1..336: mol_type = other DNA

SEQ ID NO: 1557 - DNA, 336 bp, synthetic construct; identical to SEQ ID NO: 1541
  misc_feature 1..336: note = 21H6-H5L1 VL DNA sequence
  source 1..336: mol_type = other DNA

SEQ ID NO: 1558 - DNA, 336 bp, synthetic construct; identical to SEQ ID NO: 1542
  misc_feature 1..336: note = 21H6-H5L2 VL DNA sequence
  source 1..336: mol_type = other DNA

SEQ ID NO: 1559 - DNA, 336 bp, synthetic construct; identical to SEQ ID NO: 1543
  misc_feature 1..336: note = 21H6-H5L3 VL DNA sequence
  source 1..336: mol_type = other DNA

SEQ ID NO: 1560 - DNA, 336 bp, synthetic construct; identical to SEQ ID NO: 1544
  misc_feature 1..336: note = 21H6-H5L4 VL DNA sequence
  source 1..336: mol_type = other DNA

SEQ ID NO: 1561 - DNA, 336 bp, synthetic construct; identical to SEQ ID NO: 1541
  misc_feature 1..336: note = 21H6-H6L1 VL DNA sequence
  source 1..336: mol_type = other DNA

SEQ ID NO: 1562 - DNA, 336 bp, synthetic construct; identical to SEQ ID NO: 1542
  misc_feature 1..336: note = 21H6-H6L2 VL DNA sequence
  source 1..336: mol_type = other DNA

SEQ ID NO: 1563 - DNA, 336 bp, synthetic construct; identical to SEQ ID NO: 1543
  misc_feature 1..336: note = 21H6-H6L3 VL DNA sequence
  source 1..336: mol_type = other DNA

SEQ ID NO: 1564 - DNA, 336 bp, synthetic construct; identical to SEQ ID NO: 1544
  misc_feature 1..336: note = 21H6-H6L4 VL DNA sequence
  source 1..336: mol_type = other DNA

SEQ ID NO: 1565 - DNA, 1326 bp, synthetic construct
  misc_feature 1..1326: note = 21H6-H0L0 heavy chain DNA sequence
  source 1..1326: mol_type = other DNA
cagatccagcttgtacagtctgggcctgaacttaaaaagcccggggaaacagtgaagatctcctgtaaggcttctgggtacacttttacgatctttggaatgaactgggtcaagcaggctcccggaaaaggtctgaagtggatgggctgggtgaatacatacacgggggaacccacctatgctgacgattttaaggggcggttcgctttctctctcgaaaccagcgcgagtacagcatacttacagatcaacaacttgaagaacgaagatacagctacgtatttctgtgctagagggtggttcgcgtattgggggcaaggcactctcgtcaccgtatccgccgctagcaccaagggccccagcgtgtttcctctcgctccctgcagccggagcacatccgagagcaccgctgctctgggctgtctcgtgaaggactacttccctgaacccgtcaccgtcagctggaatagcggcgccctgacatccggcgtccacacattccccgctgtcctgcagagcagcggcctgtacagcctgagctccgtggtcaccgtgcctagcagcagcctgggaacaaagacctacacctgcaacgtggaccataagccctccaacaccaaggtggacaagcgggtggaatccaagtatggacccccctgtcctccttgccctgctcctgaatttctcggaggcccctccgtcttcctgtttccccccaagcccaaggacaccctgatgatctcccggacacccgaagtcacctgcgtcgtggtggatgtcagccaggaagatcccgaggtgcagttcaactggtacgtggacggagtggaggtgcataacgccaaaaccaagcccagggaagagcagttcaacagcacctatcgggtcgtgtccgtgctcaccgtcctgcatcaggattggctcaacggcaaggagtacaagtgcaaggtgtccaacaagggcctgccctcctccatcgagaagaccatctccaaggctaagggccaacctcgggagccccaagtgtataccctccctcccagccaggaggagatgaccaagaatcaagtgagcctgacctgcctcgtgaagggattttacccctccgacatcgctgtggaatgggaaagcaatggccaacctgagaacaactacaagaccacaccccccgtgctggactccgatggctccttcttcctgtacagcaggctgaccgtggacaaatcccggtggcaagagggaaacgtgttcagctgctccgtgatgcacgaggctctccacaaccactacacccagaagagcctctccctgagcctcggctagtaa

SEQ ID NO: 1566 - DNA, 1326 bp, synthetic construct
  misc_feature 1..1326: note = 21H6-H1L1 heavy chain DNA sequence
  source 1..1326: mol_type = other DNA
caggtgcagctcgtacaaagcgggtcagagttaaagaagcctggggccagtgtgaaagtcagttgcaaagcgtccggttacactttcacaatcttcggaatgaactgggtgcgccaggctcccggccaaggattggagtggatgggatgggtcaatacatacaccggcgagcctacttatgcccagggttttaccgggaggtttgtgttctccttagatacatccgtgagtacggcttatctgcaaatctcttctctcaaggcggaagacactgcggtatattactgtgcgcggggatggttcgcatactggggacaaggcaccctcgtgaccgtgagcagcgctagcaccaagggccccagcgtgtttcctctcgctccctgcagccggagcacatccgagagcaccgctgctctgggctgtctcgtgaaggactacttccctgaacccgtcaccgtcagctggaatagcggcgccctgacatccggcgtccacacattccccgctgtcctgcagagcagcggcctgtacagcctgagctccgtggtcaccgtgcctagcagcagcctgggaacaaagacctacacctgcaacgtggaccataagccctccaacaccaaggtggacaagcgggtggaatccaagtatggacccccctgtcctccttgccctgctcctgaatttctcggaggcccctccgtcttcctgtttccccccaagcccaaggacaccctgatgatctcccggacacccgaagtcacctgcgtcgtggtggatgtcagccaggaagatcccgaggtgcagttcaactggtacgtggacggagtggaggtgcataacgccaaaaccaagcccagggaagagcagttcaacagcacctatcgggtcgtgtccgtgctcaccgtcctgcatcaggattggctcaacggcaaggagtacaagtgcaaggtgtccaacaagggcctgccctcctccatcgagaagaccatctccaaggctaagggccaacctcgggagccccaagtgtataccctccctcccagccaggaggagatgaccaagaatcaagtgagcctgacctgcctcgtgaagggattttacccctccgacatcgctgtggaatgggaaagcaatggccaacctgagaacaactacaagaccacaccccccgtgctggactccgatggctccttcttcctgtacagcaggctgaccgtggacaaatcccggtggcaagagggaaacgtgttcagctgctccgtgatgcacgaggctctccacaaccactacacccagaagagcctctccctgagcctcggctagtaa

SEQ ID NO: 1567 - DNA, 1326 bp, synthetic construct; identical to SEQ ID NO: 1566
  misc_feature 1..1326: note = 21H6-H1L2 heavy chain DNA sequence
  source 1..1326: mol_type = other DNA

SEQ ID NO: 1568 - DNA, 1326 bp, synthetic construct; identical to SEQ ID NO: 1566
  misc_feature 1..1326: note = 21H6-H1L3 heavy chain DNA sequence
  source 1..1326: mol_type = other DNA

SEQ ID NO: 1569 - DNA, 1326 bp, synthetic construct; identical to SEQ ID NO: 1566
  misc_feature 1..1326: note = 21H6-H1L4 heavy chain DNA sequence
  source 1..1326: mol_type = other DNA

SEQ ID NO: 1570 - DNA, 1326 bp, synthetic construct
  misc_feature 1..1326: note = 21H6-H2L1 heavy chain DNA sequence
  source 1..1326: mol_type = other DNA
cagatccagcttgtccagtctggatccgagttaaaaaaacctggcgccagcgttaaggtttcctgcaaagcaagtggttacacgtttacaatcttcggaatgaattgggtgcgtcaagctcccggacaaggactcgaatggatgggatgggtgaacacatacacgggcgagcctacctacgctcagggcttcacaggccgatttgtgttctccctggacacgagcgtctccactgcatatttgcaaatatccagtcttaaggcagaggacaccgctgtgtatttttgtgcacgagggtggtttgcctattggggccagggaacactggttactgtctcaagtgctagcaccaagggccccagcgtgtttcctctcgctccctgcagccggagcacatccgagagcaccgctgctctgggctgtctcgtgaaggactacttccctgaacccgtcaccgtcagctggaatagcggcgccctgacatccggcgtccacacattccccgctgtcctgcagagcagcggcctgtacagcctgagctccgtggtcaccgtgcctagcagcagcctgggaacaaagacctacacctgcaacgtggaccataagccctccaacaccaaggtggacaagcgggtggaatccaagtatggacccccctgtcctccttgccctgctcctgaatttctcggaggcccctccgtcttcctgtttccccccaagcccaaggacaccctgatgatctcccggacacccgaagtcacctgcgtcgtggtggatgtcagccaggaagatcccgaggtgcagttcaactggtacgtggacggagtggaggtgcataacgccaaaaccaagcccagggaagagcagttcaacagcacctatcgggtcgtgtccgtgctcaccgtcctgcatcaggattggctcaacggcaaggagtacaagtgcaaggtgtccaacaagggcctgccctcctccatcgagaagaccatctccaaggctaagggccaacctcgggagccccaagtgtataccctccctcccagccaggaggagatgaccaagaatcaagtgagcctgacctgcctcgtgaagggattttacccctccgacatcgctgtggaatgggaaagcaatggccaacctgagaacaactacaagaccacaccccccgtgctggactccgatggctccttcttcctgtacagcaggctgaccgtggacaaatcccggtggcaagagggaaacgtgttcagctgctccgtgatgcacgaggctctccacaaccactacacccagaagagcctctccctgagcctcggctagtaa

SEQ ID NO: 1571 - DNA, 1326 bp, synthetic construct; identical to SEQ ID NO: 1570
  misc_feature 1..1326: note = 21H6-H2L2 heavy chain DNA sequence
  source 1..1326: mol_type = other DNA

SEQ ID NO: 1572 - DNA, 1326 bp, synthetic construct; identical to SEQ ID NO: 1570
  misc_feature 1..1326: note = 21H6-H2L3 heavy chain DNA sequence
  source 1..1326: mol_type = other DNA

SEQ ID NO: 1573 - DNA, 1326 bp, synthetic construct; identical to SEQ ID NO: 1570
  misc_feature 1..1326: note = 21H6-H2L4 heavy chain DNA sequence
  source 1..1326: mol_type = other DNA

SEQ ID NO: 1574 - DNA, 1326 bp, synthetic construct
  misc_feature 1..1326: note = 21H6-H3L1 heavy chain DNA sequence
  source 1..1326: mol_type = other DNA
cagattcagctggtgcagagcggctcagaacttaagaagcccggcgccagtgtgaaagtgagttgtaaggccagcggatacactttcactatctttggcatgaattgggtgcggcaggcccccggtcagggactggagtggatggggtgggtgaatacatacactggagaacctacctacgcggacgacttcacaggacggttcgtcttctccttagacacctctgtcagcacagcttacctccagattagttccctgaaggctgaagatacggcagtatacttttgcgctagaggctggtttgcctactgggggcagggtacgcttgtgacagtgtcttctgctagcaccaagggccccagcgtgtttcctctcgctccctgcagccggagcacatccgagagcaccgctgctctgggctgtctcgtgaaggactacttccctgaacccgtcaccgtcagctggaatagcggcgccctgacatccggcgtccacacattccccgctgtcctgcagagcagcggcctgtacagcctgagctccgtggtcaccgtgcctagcagcagcctgggaacaaagacctacacctgcaacgtggaccataagccctccaacaccaaggtggacaagcgggtggaatccaagtatggacccccctgtcctccttgccctgctcctgaatttctcggaggcccctccgtcttcctgtttccccccaagcccaaggacaccctgatgatctcccggacacccgaagtcacctgcgtcgtggtggatgtcagccaggaagatcccgaggtgcagttcaactggtacgtggacggagtggaggtgcataacgccaaaaccaagcccagggaagagcagttcaacagcacctatcgggtcgtgtccgtgctcaccgtcctgcatcaggattggctcaacggcaaggagtacaagtgcaaggtgtccaacaagggcctgccctcctccatcgagaagaccatctccaaggctaagggccaacctcgggagccccaagtgtataccctccctcccagccaggaggagatgaccaagaatcaagtgagcctgacctgcctcgtgaagggattttacccctccgacatcgctgtggaatgggaaagcaatggccaacctgagaacaactacaagaccacaccccccgtgctggactccgatggctccttcttcctgtacagcaggctgaccgtggacaaatcccggtggcaagagggaaacgtgttcagctgctccgtgatgcacgaggctctccacaaccactacacccagaagagcctctccctgagcctcggctagtaa

SEQ ID NO: 1575 - DNA, 1326 bp, synthetic construct; identical to SEQ ID NO: 1574
  misc_feature 1..1326: note = 21H6-H3L2 heavy chain DNA sequence
  source 1..1326: mol_type = other DNA

SEQ ID NO: 1576 - DNA, 1326 bp, synthetic construct; identical to SEQ ID NO: 1574
  misc_feature 1..1326: note = 21H6-H3L3 heavy chain DNA sequence
  source 1..1326: mol_type = other DNA

SEQ ID NO: 1577 - DNA, 1326 bp, synthetic construct; identical to SEQ ID NO: 1574
  misc_feature 1..1326: note = 21H6-H3L4 heavy chain DNA sequence
  source 1..1326: mol_type = other DNA

SEQ ID NO: 1578 - DNA, 1326 bp, synthetic construct
  misc_feature 1..1326: note = 21H6-H4L1 heavy chain DNA sequence
  source 1..1326: mol_type = other DNA
caggtgcaactcgtccagtcagggtccgagctgaagaaacccggagcgtccgtgaaggtgtcctgtaaagcctctggctacacattcaccatattcgggatgaactgggtgcgtcaggccccagggcagggattagagtggatgggttgggtgaacacctacacaggggagccaacttacgcccaggggttcacgggcagatttgtatttagcctcgacacctccgtttcaatggcctatctccagatttcaagccttaaagctgaggacactgctgtgtactactgcgcccgcggttggtttgcatactggggccagggaacccttgtcaccgtgtcttccgctagcaccaagggccccagcgtgtttcctctcgctccctgcagccggagcacatccgagagcaccgctgctctgggctgtctcgtgaaggactacttccctgaacccgtcaccgtcagctggaatagcggcgccctgacatccggcgtccacacattccccgctgtcctgcagagcagcggcctgtacagcctgagctccgtggtcaccgtgcctagcagcagcctgggaacaaagacctacacctgcaacgtggaccataagccctccaacaccaaggtggacaagcgggtggaatccaagtatggacccccctgtcctccttgccctgctcctgaatttctcggaggcccctccgtcttcctgtttccccccaagcccaaggacaccctgatgatctcccggacacccgaagtcacctgcgtcgtggtggatgtcagccaggaagatcccgaggtgcagttcaactggtacgtggacggagtggaggtgcataacgccaaaaccaagcccagggaagagcagttcaacagcacctatcgggtcgtgtccgtgctcaccgtcctgcatcaggattggctcaacggcaaggagtacaagtgcaaggtgtccaacaagggcctgccctcctccatcgagaagaccatctccaaggctaagggccaacctcgggagccccaagtgtataccctccctcccagccaggaggagatgaccaagaatcaagtgagcctgacctgcctcgtgaagggattttacccctccgacatcgctgtggaatgggaaagcaatggccaacctgagaacaactacaagaccacaccccccgtgctggactccgatggctccttcttcctgtacagcaggctgaccgtggacaaatcccggtggcaagagggaaacgtgttcagctgctccgtgatgcacgaggctctccacaaccactacacccagaagagcctctccctgagcctcggctagtaa

SEQ ID NO: 1579 - DNA, 1326 bp, synthetic construct; identical to SEQ ID NO: 1578
  misc_feature 1..1326: note = 21H6-H4L2 heavy chain DNA sequence
  source 1..1326: mol_type = other DNA

SEQ ID NO: 1580 - DNA, 1326 bp, synthetic construct; identical to SEQ ID NO: 1578
  misc_feature 1..1326: note = 21H6-H4L3 heavy chain DNA sequence
  source 1..1326: mol_type = other DNA

SEQ ID NO: 1581 - DNA, 1326 bp, synthetic construct; identical to SEQ ID NO: 1578
  misc_feature 1..1326: note = 21H6-H4L4 heavy chain DNA sequence
  source 1..1326: mol_type = other DNA

SEQ ID NO: 1582 - DNA, 1326 bp, synthetic construct
  misc_feature 1..1326: note = 21H6-H5L1 heavy chain DNA sequence
  source 1..1326: mol_type = other DNA
cagatccagttggtccagtccggaagtgagctgaagaagcctggtgccagtgtcaaagtttcctgcaaagcctctggatataccttcaccattttcggtatgaactgggtccgacaagctccggggcaggggctcgaatggatggggtgggtgaatacatacacaggcgaaccaacatacgcacagggatttacaggtcggttcgtcttttccctggacacatctgtttccatggcctatctgcagatctctagcctgaaggctgaagataccgccgtatatttctgtgcacgggggtggttcgcctactgggggcagggcacccttgtgactgtgtctagcgctagcaccaagggccccagcgtgtttcctctcgctccctgcagccggagcacatccgagagcaccgctgctctgggctgtctcgtgaaggactacttccctgaacccgtcaccgtcagctggaatagcggcgccctgacatccggcgtccacacattccccgctgtcctgcagagcagcggcctgtacagcctgagctccgtggtcaccgtgcctagcagcagcctgggaacaaagacctacacctgcaacgtggaccataagccctccaacaccaaggtggacaagcgggtggaatccaagtatggacccccctgtcctccttgccctgctcctgaatttctcggaggcccctccgtcttcctgtttccccccaagcccaaggacaccctgatgatctcccggacacccgaagtcacctgcgtcgtggtggatgtcagccaggaagatcccgaggtgcagttcaactggtacgtggacggagtggaggtgcataacgccaaaaccaagcccagggaagagcagttcaacagcacctatcgggtcgtgtccgtgctcaccgtcctgcatcaggattggctcaacggcaaggagtacaagtgcaaggtgtccaacaagggcctgccctcctccatcgagaagaccatctccaaggctaagggccaacctcgggagccccaagtgtataccctccctcccagccaggaggagatgaccaagaatcaagtgagcctgacctgcctcgtgaagggattttacccctccgacatcgctgtggaatgggaaagcaatggccaacctgagaacaactacaagaccacaccccccgtgctggactccgatggctccttcttcctgtacagcaggctgaccgtggacaaatcccggtggcaagagggaaacgtgttcagctgctccgtgatgcacgaggctctccacaaccactacacccagaagagcctctccctgagcctcggctagtaa

SEQ ID NO: 1583 - DNA, 1326 bp, synthetic construct; identical to SEQ ID NO: 1582
  misc_feature 1..1326: note = 21H6-H5L2 heavy chain DNA sequence
  source 1..1326: mol_type = other DNA

SEQ ID NO: 1584 - DNA, 1326 bp, synthetic construct; identical to SEQ ID NO: 1582
  misc_feature 1..1326: note = 21H6-H5L3 heavy chain DNA sequence
  source 1..1326: mol_type = other DNA

SEQ ID NO: 1585 - DNA, 1326 bp, synthetic construct; identical to SEQ ID NO: 1582
  misc_feature 1..1326: note = 21H6-H5L4 heavy chain DNA sequence
  source 1..1326: mol_type = other DNA

SEQ ID NO: 1586 - DNA, 1326 bp, synthetic construct
  misc_feature 1..1326: note = 21H6-H6L1 heavy chain DNA sequence
  source 1..1326: mol_type = other DNA
cagatccagctggtccagagtggctccgagctgaaaaagcctggagcttctgtgaaagtctcctgcaaagcttctggctacacatttactatctttgggatgaactgggtaaggcaggccccaggccaaggactggagtggatgggctgggttaatacctacacaggcgagcccacgtacgctgacgacttcacagggaggtttgtgttttccctggatacctccgttagcatggcctatttgcagattagttccctgaaggcagaggatactgccgtgtacttttgtgcacgaggatggtttgcctattggggccagggtaccttggtgaccgtctccagcgctagcaccaagggccccagcgtgtttcctctcgctccctgcagccggagcacatccgagagcaccgctgctctgggctgtctcgtgaaggactacttccctgaacccgtcaccgtcagctggaatagcggcgccctgacatccggcgtccacacattccccgctgtcctgcagagcagcggcctgtacagcctgagctccgtggtcaccgtgcctagcagcagcctgggaacaaagacctacacctgcaacgtggaccataagccctccaacaccaaggtggacaagcgggtggaatccaagtatggacccccctgtcctccttgccctgctcctgaatttctcggaggcccctccgtcttcctgtttccccccaagcccaaggacaccctgatgatctcccggacacccgaagtcacctgcgtcgtggtggatgtcagccaggaagatcccgaggtgcagttcaactggtacgtggacggagtggaggtgcataacgccaaaaccaagcccagggaagagcagttcaacagcacctatcgggtcgtgtccgtgctcaccgtcctgcatcaggattggctcaacggcaaggagtacaagtgcaaggtgtccaacaagggcctgccctcctccatcgagaagaccatctccaaggctaagggccaacctcgggagccccaagtgtataccctccctcccagccaggaggagatgaccaagaatcaagtgagcctgacctgcctcgtgaagggattttacccctccgacatcgctgtggaatgggaaagcaatggccaacctgagaacaactacaagaccacaccccccgtgctggactccgatggctccttcttcctgtacagcaggctgaccgtggacaaatcccggtggcaagagggaaacgtgttcagctgctccgtgatgcacgaggctctccacaaccactacacccagaagagcctctccctgagcctcggctagtaa

SEQ ID NO: 1587 - DNA, 1326 bp, synthetic construct; identical to SEQ ID NO: 1586
  misc_feature 1..1326: note = 21H6-H6L2 heavy chain DNA sequence
  source 1..1326: mol_type = other DNA

SEQ ID NO: 1588 - DNA, 1326 bp, synthetic construct; identical to SEQ ID NO: 1586
  misc_feature 1..1326: note = 21H6-H6L3 heavy chain DNA sequence
  source 1..1326: mol_type = other DNA

SEQ ID NO: 1589 - DNA, 1326 bp, synthetic construct; identical to SEQ ID NO: 1586
  misc_feature 1..1326: note = 21H6-H6L4 heavy chain DNA sequence
  source 1..1326: mol_type = other DNA

SEQ ID NO: 1590 - DNA, 660 bp, synthetic construct
  misc_feature 1..660: note = 21H6-H0L0 light chain DNA sequence
  source 1..660: mol_type = other DNA
gatgtcgttatgactcagaccccactcacgctctcagtgaccatcggacagcctgccagcatctcatgtaaaagtagtcgcagcctgttagattctgacggcaagacctatctgaactggctgctgcagcgtcctggccagagcccaaaaaggctgatctatctcgtctcaaagctggattcaggagtccccgatcggtttacgggtagcggatctggcaccgacttcacactgaagatttctcgggttgaagccgaagatttgggcgtctactattgctggcaaggaacacacttccctcagacctttggcggcggcacaaagctggaaattaataggaccgtggccgcccccagcgtgttcatcttccctcccagcgacgagcagctgaagtctggcaccgccagcgtggtgtgcctgctgaacaacttctacccccgcgaggccaaggtgcagtggaaggtggacaacgccctgcagagcggcaacagccaggagagcgtgaccgagcaggactccaaggacagcacctacagcctgagcagcaccctgaccctgagcaaggccgactacgagaagcacaaggtgtacgcctgcgaggtgacccaccagggactgtctagccccgtgaccaagagcttcaaccggggcgagtgctaa

SEQ ID NO: 1591 - DNA, 660 bp, synthetic construct
  misc_feature 1..660: note = 21H6-H1L1 light chain DNA sequence
  source 1..660: mol_type = other DNA
gatatagtgatgacacagacccccctgtctctctcagttacccccggacaacccgcctctatcagttgcaagagtagtcgctctctgctcgattccgacggaaagacttatctgaattggtatttacaaaaacctgggcagagtccccagcgccttatatatctcgtgtccaaactcgatagcggcgtgcctgaccggttcagcggttcaggctccgggaccgactttacactgaagattagtagggtcgaggcagaagacgtcggtgtttattactgttggcagggcacccatttccctcagacgtttggcggaggtaccaaggtagagataaagaggaccgtggccgcccccagcgtgttcatcttccctcccagcgacgagcagctgaagtctggcaccgccagcgtggtgtgcctgctgaacaacttctacccccgcgaggccaaggtgcagtggaaggtggacaacgccctgcagagcggcaacagccaggagagcgtgaccgagcaggactccaaggacagcacctacagcctgagcagcaccctgaccctgagcaaggccgactacgagaagcacaaggtgtacgcctgcgaggtgacccaccagggactgtctagccccgtgaccaagagcttcaaccggggcgagtgctaa

SEQ ID NO: 1592 - DNA, 660 bp, synthetic construct
  misc_feature 1..660: note = 21H6-H1L2 light chain DNA sequence
  source 1..660: mol_type = other DNA
gatgtggtgatgactcagactcctctgagcctgtccgtgaccccaggacaacctgcttccatttcctgtaaatcctcccgttccttattggatagcgacgggaagacatacctgaactggctgctgcagaaacccgggcagtccccgcagagattaatatatctggtatctaagctggatagtggtgtaccagatcggtttagcggatccggctcaggtaccgacttcacgctcaagatctccagggtggaggctgaggatgtaggagtatactactgttggcaggggacccattttcctcaaacatttggggggggaacaaaggtagagatcaagaggaccgtggccgcccccagcgtgttcatcttccctcccagcgacgagcagctgaagtctggcaccgccagcgtggtgtgcctgctgaacaacttctacccccgcgaggccaaggtgcagtggaaggtggacaacgccctgcagagcggcaacagccaggagagcgtgaccgagcaggactccaaggacagcacctacagcctgagcagcaccctgaccctgagcaaggccgactacgagaagcacaaggtgtacgcctgcgaggtgacccaccagggactgtctagccccgtgaccaagagcttcaaccggggcgagtgctaa

SEQ ID NO: 1593 - DNA, 660 bp, synthetic construct
  misc_feature 1..660: note = 21H6-H1L3 light chain DNA sequence
  source 1..660: mol_type = other DNA
gatgtggtgatgactcagtctccactcagcctgcctgtaaccttagggcaacctgcctccatcagttgtcgctccagtcgttctctgctggattcagacggtaaaacctatctgaattggttccagcagcgtccaggacagtctccacgccgactgatatatctcgtgagtaagttggattcaggcgtgcccgatcgcttcagtggcagcgggtctgggactgactttaccctgaaaatatcccgcgtggaggcggaagatgtcggggtatattactgttggcagggtacacatttcccacagacattcgggggaggcactaaggtggaaattaaaaggaccgtggccgcccccagcgtgttcatcttccctcccagcgacgagcagctgaagtctggcaccgccagcgtggtgtgcctgctgaacaacttctacccccgcgaggccaaggtgcagtggaaggtggacaacgccctgcagagcggcaacagccaggagagcgtgaccgagcaggactccaaggacagcacctacagcctgagcagcaccctgaccctgagcaaggccgactacgagaagcacaaggtgtacgcctgcgaggtgacccaccagggactgtctagccccgtgaccaagagcttcaaccggggcgagtgctaa

SEQ ID NO: 1594 - DNA, 660 bp, synthetic construct
  misc_feature 1..660: note = 21H6-H1L4 light chain DNA sequence
  source 1..660: mol_type = other DNA
gacgtggtgatgacacagagcccgctgtctctcccggtaacgctgggccagccggcgtctattagctgtaagagtagccgaagtctccttgatagcgacggaaaaacctatctgaactggcttcagcaacgccctgggcagtccccccgccgcctgatttatctggtgtccaaactggacagcggcgtgcccgacaggttctccgggagcggtagcggtactgactttacgctcaagatttcccgcgtggaggccgaggatgtcggggtatattactgctggcaggggacgcattttccgcagacctttggcggaggcaccaaagtggagatcaaaaggaccgtggccgcccccagcgtgttcatcttccctcccagcgacgagcagctgaagtctggcaccgccagcgtggtgtgcctgctgaacaacttctacccccgcgaggccaaggtgcagtggaaggtggacaacgccctgcagagcggcaacagccaggagagcgtgaccgagcaggactccaaggacagcacctacagcctgagcagcaccctgaccctgagcaaggccgactacgagaagcacaaggtgtacgcctgcgaggtgacccaccagggactgtctagccccgtgaccaagagcttcaaccggggcgagtgctaa

SEQ ID NO: 1595 - DNA, 660 bp, synthetic construct; identical to SEQ ID NO: 1591
  misc_feature 1..660: note = 21H6-H2L1 light chain DNA sequence
  source 1..660: mol_type = other DNA

SEQ ID NO: 1596 - DNA, 660 bp, synthetic construct; identical to SEQ ID NO: 1592
  misc_feature 1..660: note = 21H6-H2L2 light chain DNA sequence
  source 1..660: mol_type = other DNA

SEQ ID NO: 1597 - DNA, 660 bp, synthetic construct; identical to SEQ ID NO: 1593
  misc_feature 1..660: note = 21H6-H2L3 light chain DNA sequence
  source 1..660: mol_type = other DNA

SEQ ID NO: 1598 - DNA, 660 bp, synthetic construct; identical to SEQ ID NO: 1594
  misc_feature 1..660: note = 21H6-H2L4 light chain DNA sequence
  source 1..660: mol_type = other DNA

SEQ ID NO: 1599 - DNA, 660 bp, synthetic construct; identical to SEQ ID NO: 1591
  misc_feature 1..660: note = 21H6-H3L1 light chain DNA sequence
  source 1..660: mol_type = other DNA

SEQ ID NO: 1600 - DNA, 660 bp, synthetic construct; identical to SEQ ID NO: 1592
  misc_feature 1..660: note = 21H6-H3L2 light chain DNA sequence
  source 1..660: mol_type = other DNA

SEQ ID NO: 1601 - DNA, 660 bp, synthetic construct; identical to SEQ ID NO: 1593
  misc_feature 1..660: note = 21H6-H3L3 light chain DNA sequence
  source 1..660: mol_type = other DNA

SEQ ID NO: 1602 - DNA, 660 bp, synthetic construct; identical to SEQ ID NO: 1594
  misc_feature 1..660: note = 21H6-H3L4 light chain DNA sequence
  source 1..660: mol_type = other DNA

SEQ ID NO: 1603 - DNA, 660 bp, synthetic construct; identical to SEQ ID NO: 1591
  misc_feature 1..660: note = 21H6-H4L1 light chain DNA sequence
  source 1..660: mol_type = other DNA

SEQ ID NO: 1604 - DNA, 660 bp, synthetic construct; identical to SEQ ID NO: 1592
  misc_feature 1..660: note = 21H6-H4L2 light chain DNA sequence
  source 1..660: mol_type = other DNA

SEQ ID NO: 1605 - DNA, 660 bp, synthetic construct; identical to SEQ ID NO: 1593
  misc_feature 1..660: note = 21H6-H4L3 light chain DNA sequence
  source 1..660: mol_type = other DNA

SEQ ID NO: 1606 - DNA, 660 bp, synthetic construct; identical to SEQ ID NO: 1594
  misc_feature 1..660: note = 21H6-H4L4 light chain DNA sequence
  source 1..660: mol_type = other DNA

SEQ ID NO: 1607 - DNA, 660 bp, synthetic construct; identical to SEQ ID NO: 1591
  misc_feature 1..660: note = 21H6-H5L1 light chain DNA sequence
  source 1..660: mol_type = other DNA

SEQ ID NO: 1608 - DNA, 660 bp, synthetic construct; identical to SEQ ID NO: 1592
  misc_feature 1..660: note = 21H6-H5L2 light chain DNA sequence
  source 1..660: mol_type = other DNA

SEQ ID NO: 1609 - DNA, 660 bp, synthetic construct; identical to SEQ ID NO: 1593
  misc_feature 1..660: note = 21H6-H5L3 light chain DNA sequence
  source 1..660: mol_type = other DNA

SEQ ID NO: 1610 - DNA, 660 bp, synthetic construct; identical to SEQ ID NO: 1594
  misc_feature 1..660: note = 21H6-H5L4 light chain DNA sequence
  source 1..660: mol_type = other DNA

SEQ ID NO: 1611 - DNA, 660 bp, synthetic construct; identical to SEQ ID NO: 1591
  misc_feature 1..660: note = 21H6-H6L1 light chain DNA sequence
  source 1..660: mol_type = other DNA

SEQ ID NO: 1612 - DNA, 660 bp, synthetic construct; identical to SEQ ID NO: 1592
  misc_feature 1..660: note = 21H6-H6L2 light chain DNA sequence
  source 1..660: mol_type = other DNA

SEQ ID NO: 1613 - DNA, 660 bp, synthetic construct; identical to SEQ ID NO: 1593
  misc_feature 1..660: note = 21H6-H6L3 light chain DNA sequence
  source 1..660: mol_type = other DNA

SEQ ID NO: 1614 - DNA, 660 bp, synthetic construct; identical to SEQ ID NO: 1594
  misc_feature 1..660: note = 21H6-H6L4 light chain DNA sequence
  source 1..660: mol_type = other DNA

SEQ ID NO: 1615 - protein, 329 aa, synthetic construct
  REGION 1..329: note = Exemplary hIgG1(KEM) Fc region
ASTKGPSVFPLAPSSKSTSGGTAALGCLVKDYFPEPVTVSWNSGALTSGVHTFPAVLQSSGLYSLSSVVTVPSSSLGTQTYICNVNHKPSNTKVDKKVEPKSCDKTHTCPPCPAPELLGGPSVFLFPPKPKDTLMISRTPEVTCVVVDVSHEDPEVKFNWYVDGVEVHNAKTKPREEQYNSTYRVVSVLTVLHQDWLNGKEYKCKVSNKALPAPIEKTISKAKGQPREPQVYTLPPSREEMTKNQVSLTCLVKGFYPSDIAVEWESNGQPENNYKTTPPVLDSDGSFFLYSKLTVDKSRWQQGNVFSCSVMHEALHNHYTQKSLSLSPG

SEQ ID NO: 1616 - protein, 329 aa, synthetic construct
  REGION 1..329: note = Exemplary hIgG1(REM) Fc region
ASTKGPSVFPLAPSSKSTSGGTAALGCLVKDYFPEPVTVSWNSGALTSGVHTFPAVLQSSGLYSLSSVVTVPSSSLGTQTYICNVNHKPSNTKVDKRVEPKSCDKTHTCPPCPAPELLGGPSVFLFPPKPKDTLMISRTPEVTCVVVDVSHEDPEVKFNWYVDGVEVHNAKTKPREEQYNSTYRVVSVLTVLHQDWLNGKEYKCKVSNKALPAPIEKTISKAKGQPREPQVYTLPPSREEMTKNQVSLTCLVKGFYPSDIAVEWESNGQPENNYKTTPPVLDSDGSFFLYSKLTVDKSRWQQGNVFSCSVMHEALHNHYTQKSLSLSPG

SEQ ID NO: 1617 - protein, 329 aa, synthetic construct
  REGION 1..329: note = Exemplary hIgG1(LALAPGv2) Fc region
ASTKGPSVFPLAPSSKSTSGGTAALGCLVKDYFPEPVTVSWNSGALTSGVHTFPAVLQSSGLYSLSSVVTVPSSSLGTQTYICNVNHKPSNTKVDKKVEPKSCDKTHTCPPCPAPEAAGGPSVFLFPPKPKDTLMISRTPEVTCVVVDVSHEDPEVKFNWYVDGVEVHNAKTKPREEQYNSTYRVVSVLTVLHQDWLNGKEYKCKVSNKALGAPIEKTISKAKGQPREPQVYTLPPSREEMTKNQVSLTCLVKGFYPSDIAVEWESNGQPENNYKTTPPVLDSDGSFFLYSKLTVDKSRWQQGNVFSCSVMHEALHNHYTQKSLSLSPG

SEQ ID NO: 1618 - protein, 492 aa, Homo sapiens
MEPSSKKLTGRLMLAVGGAVLGSLQFGYNTGVINAPQKVIEEFYNQTWVHRYGESILPTTLTTLWSLSVAIFSVGGMIGSFSVGLFVNRFGRRNSMLMMNLLAFVSAVLMGFSKLGKSFEMLILGRFIIGVYCGLTTGFVPMYVGEVSPTALRGALGTLHQLGIVVGILIAQVFGLDSIMGNKDLWPLLLSIIFIPALLQCIVLPFCPESPRFLLINRNEENRAKSVLKKLRGTADVTHDLQEMKEESRQMMREKKVTILELFRSPAYRQPILIAVVLQLSQQLSGINAVFYYSTSIFEKAGVQQPVYATIGSGIVNTAFTVVSLFVVERAGRRTLHLIGLAGMAGCAILMTIALALLEQLPWMSYLSIVAIFGFVAFFEVGPGPIPWFIVAELFSQGPRPAAIAVAGFSNWTSNFIVGMCFQYVEQLCGPYVFIIFTVLLVLFFIFTYFKVPETKGRTFDEIASGFRQGGASQSDKTPEELFHPLGADSQV

SEQ ID NO: 1619 - protein, 15 aa, synthetic construct
  REGION 1..15: note = Gal3 peptide 014
AYPGQAPPGAYPGAP

SEQ ID NO: 1620 - protein, 15 aa, synthetic construct
  REGION 1..15: note = Gal3 peptide 015
QAPPGAYPGAPGAYP

SEQ ID NO: 1621 - protein, 15 aa, synthetic construct
  REGION 1..15: note = Gal3 peptide 016
GAYPGAPGAYPGAPA

SEQ ID NO: 1622 - protein, 15 aa, synthetic construct
  REGION 1..15: note = Gal3 peptide 017
GAPGAYPGAPAPGVY

SEQ ID NO: 1623 - protein, 15 aa, synthetic construct
  REGION 1..15: note = Gal3 peptide 018
AYPGAPAPGVYPGPP

SEQ ID NO: 1624 - protein, 15 aa, synthetic construct
  REGION 1..15: note = Gal3 peptide 019
APAPGVYPGPPSGPG

SEQ ID NO: 1625 - protein, 15 aa, synthetic construct
  REGION 1..15: note = Gal3 peptide 020
GVYPGPSSGPGAYPS

SEQ ID NO: 1626 - protein, 15 aa, synthetic construct
  REGION 1..15: note = Gal3 peptide 021
GPPSGPGAYPSSGQP

SEQ ID NO: 1627 - protein, 15 aa, synthetic construct
  REGION 1..15: note = Gal3 peptide 022
GPGAYPSSGQPSATG

SEQ ID NO: 1628 - protein, 15 aa, synthetic construct
  REGION 1..15: note = Gal3 peptide 023
YPSSGQPSATGAYPA

SEQ ID NO: 1629 - protein, 15 aa, synthetic construct
  REGION 1..15: note = Gal3 peptide 024
GQPSATGAYPATGPY

SEQ ID NO: 1630 - protein, 15 aa, synthetic construct
  REGION 1..15: note = Gal3 peptide 025
ATGAYPATGPYGAPA

SEQ ID NO: 1631 - protein, 15 aa, synthetic construct
  REGION 1..15: note = Gal3 mutant peptide 20
AYPGQAPAGAYPGAP

SEQ ID NO: 1632 - protein, 15 aa, synthetic construct
  REGION 1..15: note = Gal3 mutant peptide 21
QAPPGAYAGAPGAYP

SEQ ID NO: 1633 - protein, 15 aa, synthetic construct
  REGION 1..15: note = Gal3 mutant peptide 22
GAYPGAPAAYPGAPA

SEQ ID NO: 1634 - protein, 15 aa, synthetic construct
  REGION 1..15: note = Gal3 mutant peptide 23
GAPGAYPAAPAPGVY

SEQ ID NO: 1635 - protein, 15 aa, synthetic construct
  REGION 1..15: note = Gal3 mutant peptide 24
AYPGAPAAGVYPGPP

SEQ ID NO: 1636 - protein, 15 aa, synthetic construct
  REGION 1..15: note = Gal3 mutant peptide 25
APAPGVYAGPPSGPG

SEQ ID NO: 1637 - protein, 15 aa, synthetic construct
  REGION 1..15: note = Gal3 mutant peptide 26
GVYPGPPAGPGAYPS

SEQ ID NO: 1638 - protein, 15 aa, synthetic construct
  REGION 1..15: note = Gal3 mutant peptide 27
GPPSGPGAYPSSGQP

SEQ ID NO: 1639 - protein, 15 aa, synthetic construct
  REGION 1..15: note = Gal3 mutant peptide 28
GPGAYPSAGQPSATG

SEQ ID NO: 1640 - protein, 15 aa, synthetic construct
  REGION 1..15: note = Gal3 mutant peptide 29
YPSSGQPAATGAYPA

SEQ ID NO: 1641 - protein, 15 aa, synthetic construct
  REGION 1..15: note = Gal3 mutant peptide 60
AYPGQAPAAAYPGAP

SEQ ID NO: 1642 - protein, 15 aa, synthetic construct
  REGION 1..15: note = Gal3 mutant peptide 61
QAPPGAYAAAPGAYP

SEQ ID NO: 1643 - protein, 15 aa, synthetic construct
  REGION 1..15: note = Gal3 mutant peptide 62
GAYPGAPAAYPGAPA

SEQ ID NO: 1644 - protein, 15 aa, synthetic construct
  REGION 1..15: note = Gal3 mutant peptide 63
GAPGAYPAAPAPGVY

SEQ ID NO: 1645 - protein, 15 aa, synthetic construct
  REGION 1..15: note = Gal3 mutant peptide 64
AYPGAPAAAVYPGPP

SEQ ID NO: 1646 - protein, 15 aa, synthetic construct
  REGION 1..15: note = Gal3 mutant peptide 65
APAPGVYAAPPSGPG

SEQ ID NO: 1647 - protein, 15 aa, synthetic construct
  REGION 1..15: note = Gal3 mutant peptide 66
GVYPGPPAAPGAYPS

SEQ ID NO: 1648 - protein, 15 aa, synthetic construct
  REGION 1..15: note = Gal3 mutant peptide 67
GPPSGPGAAPSSGQP

SEQ ID NO: 1649 - protein, 15 aa, synthetic construct
  REGION 1..15: note = Gal3 mutant peptide 68
GPGAYPSAAQPSATG

SEQ ID NO: 1650 - protein, 15 aa, synthetic construct
  REGION 1..15: note = Gal3 mutant peptide 69
YPSSGQPAATGAYPA

SEQ ID NO: 1651 - protein, 15 aa, synthetic construct
  REGION 1..15: note = Gal3 mutant peptide 98
AYPGQAAAAAYPGAP

SEQ ID NO: 1652 - protein, 15 aa, synthetic construct
  REGION 1..15: note = Gal3 mutant peptide 99
QAPPGAAAAAPGAYP

SEQ ID NO: 1653 - protein, 15 aa, synthetic construct
  REGION 1..15: note = Gal3 mutant peptide 100
GAYPGAAAAYPGAPA

SEQ ID NO: 1654 - protein, 15 aa, synthetic construct
  REGION 1..15: note = Gal3 mutant peptide 101
GAPGAYAAAPAPGVY

SEQ ID NO: 1655 - protein, 15 aa, synthetic construct
  REGION 1..15: note = Gal3 mutant peptide 102
AYPGAPAAAVYPGPP

SEQ ID NO: 1656 - protein, 15 aa, synthetic construct
  REGION 1..15: note = Gal3 mutant peptide 103
APAPGVAAAPPSGPG

SEQ ID NO: 1657 - protein, 15 aa, synthetic construct
  REGION 1..15: note = Gal3 mutant peptide 104
GVYPGPAAAPGAYPS

SEQ ID NO: 1658 - protein, 15 aa, synthetic construct
  REGION 1..15: note = Gal3 mutant peptide 105
GPPSGPAAAPSSGQP

SEQ ID NO: 1659 - protein, 15 aa, synthetic construct
  REGION 1..15: note = Gal3 mutant peptide 106
GPGAYPAAAQPSATG

SEQ ID NO: 1660 - protein, 15 aa, synthetic construct
  REGION 1..15: note = Gal3 mutant peptide 107
YPSSGQAAATGAYPA

SEQ ID NO: 1661 - DNA, 1425 bp, synthetic construct
  misc_feature 1..1425: note = 4A11-VH3-hIgG4(S228P)-VL1 (TB006) HC NT Sequence
  source 1..1425: mol_type = other DNA
atggaccccaagggcagcctgagctggagaatcctgctgttcctgagcctggccttcgagctgagctacggccaggttcaattggtgcagagcggatctgagttgaaaaaacctggagcctccgtcaaggtttcatgtaaggcttccggttacacatttactgagtacactatacactgggtacgccaagcacccggtcagggtttggaatggatgggttggttttaccccggctctgataacattaactacaatgaaggtttcactgggcgatttgttctttccgcagataagagcgtaagcacagcatatctccagatatgcagcctgaaggcagaagacaccgctgtgtacttttgtgcccgtcacgaagaaggggttataaccactgtcagttatttcgactactggggtcaagggactcttgtaacagtttcatctgctagcaccaagggccccagcgtgtttcctctcgctccctgcagccggagcacatccgagagcaccgctgctctgggctgtctcgtgaaggactacttccctgaacccgtcaccgtcagctggaatagcggcgccctgacatccggcgtccacacattccccgctgtcctgcagagcagcggcctgtacagcctgagctccgtggtcaccgtgcctagcagcagcctgggaacaaagacctacacctgcaacgtggaccataagccctccaacaccaaggtggacaagcgggtggaatccaagtatggacccccctgtcctccttgccctgctcctgaatttctcggaggcccctccgtcttcctgtttccccccaagcccaaggacaccctgatgatctcccggacacccgaagtcacctgcgtcgtggtggatgtcagccaggaagatcccgaggtgcagttcaactggtacgtggacggagtggaggtgcataacgccaaaaccaagcccagggaagagcagttcaacagcacctatcgggtcgtgtccgtgctcaccgtcctgcatcaggattggctcaacggcaaggagtacaagtgcaaggtgtccaacaagggcctgccctcctccatcgagaagaccatctccaaggctaagggccaacctcgggagccccaagtgtataccctccctcccagccaggaggagatgaccaagaatcaagtgagcctgacctgcctcgtgaagggattttacccctccgacatcgctgtggaatgggaaagcaatggccaacctgagaacaactacaagaccacaccccccgtgctggactccgatggctccttcttcctgtacagcaggctgaccgtggacaaatcccggtggcaagagggaaacgtgttcagctgctccgtgatgcacgaggctctccacaaccactacacccagaagagcctctccctgagcctcggctagtaa

SEQ ID NO: 1662 - DNA, 1425 bp, synthetic construct; identical to SEQ ID NO: 1661
  misc_feature 1..1425: note = 13H12-VH3-hIgG4(S228P)-VL1 HC NT Sequence
  source 1..1425: mol_type = other DNA

SEQ ID NO: 1663 - DNA, 1404 bp, synthetic construct
  misc_feature 1..1404: note = 19B5-H1L1-hIgG4(S228P) HC NT Sequence
  source 1..1404: mol_type = other DNA
atggaccccaagggcagcctgagctggagaatcctgctgttcctgagcctggccttcgagctgagctacggccaagtgcaacttgtccaatcaggctccgagctgaagaaacccggagcttcagtaaaggtgtcttgtaaggcttctggctatacattcaccacatatgctatgagttgggtccgacaagcaccaggacagggcctcgaatggatgggctggatcaacacctattctggcgtacctacttacgcagacgatttcactggccgatttgtcttctccctcgaaacatccgtatctactgcctacctccaaatcagcagtctcaaagcagaagataccgcagtatatttttgcgctagaggaccctacgcaatggactactggggccaaggaacactggtaaccgtttcttcagctagcaccaagggccccagcgtgtttcctctcgctccctgcagccggagcacatccgagagcaccgctgctctgggctgtctcgtgaaggactacttccctgaacccgtcaccgtcagctggaatagcggcgccctgacatccggcgtccacacattccccgctgtcctgcagagcagcggcctgtacagcctgagctccgtggtcaccgtgcctagcagcagcctgggaacaaagacctacacctgcaacgtggaccataagccctccaacaccaaggtggacaagcgggtggaatccaagtatggacccccctgtcctccttgccctgctcctgaatttctcggaggcccctccgtcttcctgtttccccccaagcccaaggacaccctgatgatctcccggacacccgaagtcacctgcgtcgtggtggatgtcagccaggaagatcccgaggtgcagttcaactggtacgtggacggagtggaggtgcataacgccaaaaccaagcccagggaagagcagttcaacagcacctatcgggtcgtgtccgtgctcaccgtcctgcatcaggattggctcaacggcaaggagtacaagtgcaaggtgtccaacaagggcctgccctcctccatcgagaagaccatctccaaggctaagggccaacctcgggagccccaagtgtataccctccctcccagccaggaggagatgaccaagaatcaagtgagcctgacctgcctcgtgaagggattttacccctccgacatcgctgtggaatgggaaagcaatggccaacctgagaacaactacaagaccacaccccccgtgctggactccgatggctccttcttcctgtacagcaggctgaccgtggacaaatcccggtggcaagagggaaacgtgttcagctgctccgtgatgcacgaggctctccacaaccactacacccagaagagcctctccctgagcctcggctagtaa

SEQ ID NO: 1664 - DNA, 1407 bp, synthetic construct
  misc_feature 1..1407: note = 14H10.2C9-hIgG4(S228P) HC NT Sequence
  source 1..1407: mol_type = other DNA
atggaccccaagggcagcctgagctggagaatcctgctgttcctgagcctggccttcgagctgagctacggccagatccagttggtacagtctggacctgagctgaagaagcctggagagacagtcaagatctcctgcaaggcttctgggtataccttcacaacctatggaatgggctgggtgaaacaggctccaggaaaggatttaaagtggatgggctggataaacacctactctggagtgccaacatatgctgatgacttcaagggacggtttgccttctctttggaaacctctgccagcactgcctatttgcagatcagcaacctcaaaaatgaagacacggctacatatttctgttcaaccccttatgaatacgacggggcttactggggccaggggactctggtcactgtctctgcagctagcaccaagggccccagcgtgtttcctctcgctccctgcagccggagcacatccgagagcaccgctgctctgggctgtctcgtgaaggactacttccctgaacccgtcaccgtcagctggaatagcggcgccctgacatccggcgtccacacattccccgctgtcctgcagagcagcggcctgtacagcctgagctccgtggtcaccgtgcctagcagcagcctgggaacaaagacctacacctgcaacgtggaccataagccctccaacaccaaggtggacaagcgggtggaatccaagtatggacccccctgtcctccttgccctgctcctgaatttctcggaggcccctccgtcttcctgtttccccccaagcccaaggacaccctgatgatctcccggacacccgaagtcacctgcgtcgtggtggatgtcagccaggaagatcccgaggtgcagttcaactggtacgtggacggagtggaggtgcataacgccaaaaccaagcccagggaagagcagttcaacagcacctatcgggtcgtgtccgtgctcaccgtcctgcatcaggattggctcaacggcaaggagtacaagtgcaaggtgtccaacaagggcctgccctcctccatcgagaagaccatctccaaggctaagggccaacctcgggagccccaagtgtataccctccctcccagccaggaggagatgaccaagaatcaagtgagcctgacctgcctcgtgaagggattttacccctccgacatcgctgtggaatgggaaagcaatggccaacctgagaacaactacaagaccacaccccccgtgctggactccgatggctccttcttcctgtacagcaggctgaccgtggacaaatcccggtggcaagagggaaacgtgttcagctgctccgtgatgcacgaggctctccacaaccactacacccagaagagcctctccctgagcctcggctagtaa

SEQ ID NO: 1665 - DNA, 1401 bp, synthetic construct
  misc_feature 1..1401: note = 15G7.2A7-hIgG4(S228P) HC NT Sequence
  source 1..1401: mol_type = other DNA
atggaccccaagggcagcctgagctggagaatcctgctgttcctgagcctggccttcgagctgagctacggcgaggtccagctgcaacaatctggacctgagctggtgaagcctggggcttcagtgaagatatcctgtaaggcttctggatacacgttcactgactactacatgaactgggtgaagcagagccatggaaagagccttgagtggattggagatattaatcctaacaatggtggtactaactacaaccagaagttcaagggcaaggccacattgactgtagacaagtcctccagcacagcctacatggagctccgcagcctgacatctgaggactctgcagtctattactgcacctcaggctacgggtttccttactggggccaggggactctggtcactgtctctgcagctagcaccaagggccccagcgtgtttcctctcgctccctgcagccggagcacatccgagagcaccgctgctctgggctgtctcgtgaaggactacttccctgaacccgtcaccgtcagctggaatagcggcgccctgacatccggcgtccacacattccccgctgtcctgcagagcagcggcctgtacagcctgagctccgtggtcaccgtgcctagcagcagcctgggaacaaagacctacacctgcaacgtggaccataagccctccaacaccaaggtggacaagcgggtggaatccaagtatggacccccctgtcctccttgccctgctcctgaatttctcggaggcccctccgtcttcctgtttccccccaagcccaaggacaccctgatgatctcccggacacccgaagtcacctgcgtcgtggtggatgtcagccaggaagatcccgaggtgcagttcaactggtacgtggacggagtggaggtgcataacgccaaaaccaagcccagggaagagcagttcaacagcacctatcgggtcgtgtccgtgctcaccgtcctgcatcaggattggctcaacggcaaggagtacaagtgcaaggtgtccaacaagggcctgccctcctccatcgagaagaccatctccaaggctaagggccaacctcgggagccccaagtgtataccctccctcccagccaggaggagatgaccaagaatcaagtgagcctgacctgcctcgtgaagggattttacccctccgacatcgctgtggaatgggaaagcaatggccaacctgagaacaactacaagaccacaccccccgtgctggactccgatggctccttcttcctgtacagcaggctgaccgtggacaaatcccggtggcaagagggaaacgtgttcagctgctccgtgatgcacgaggctctccacaaccactacacccagaagagcctctccctgagcctcggctagtaa

SEQ ID NO: 1666 - DNA, 1416 bp, synthetic construct
  misc_feature 1..1416: note = MOPC21-hIgG4(S228P) HC NT Sequence
  source 1..1416: mol_type = other DNA
atggaccccaagggcagcctgagctggagaatcctgctgttcctgagcctggccttcgagctgagctacggcgacgtgcagctggtggagtccggcggcggcctggtgcagcccggcggctccaggaaactgtcctgcgccgcctccggcttcacattctcctccttcggcatgcactgggtgaggcaggcccccgagaaaggcctggagtgggtggcctacatctcctccggctcctccacactgcactacgccgacacagtgaaaggcaggttcacaatctccagggacaaccccaaaaacacactgttcctgcagatgacatccctgaggtccgaggacacaggcatgtactactgcgccaggtggggcaactacccctactacgccatggactactggggccagggcacatccgtgacagtgtcctccgctagcaccaagggccccagcgtgtttcctctcgctccctgcagccggagcacatccgagagcaccgctgctctgggctgtctcgtgaaggactacttccctgaacccgtcaccgtcagctggaatagcggcgccctgacatccggcgtccacacattccccgctgtcctgcagagcagcggcctgtacagcctgagctccgtggtcaccgtgcctagcagcagcctgggaacaaagacctacacctgcaacgtggaccataagccctccaacaccaaggtggacaagcgggtggaatccaagtatggacccccctgtcctccttgccctgctcctgaatttctcggaggcccctccgtcttcctgtttccccccaagcccaaggacaccctgatgatctcccggacacccgaagtcacctgcgtcgtggtggatgtcagccaggaagatcccgaggtgcagttcaactggtacgtggacggagtggaggtgcataacgccaaaaccaagcccagggaagagcagttcaacagcacctatcgggtcgtgtccgtgctcaccgtcctgcatcaggattggctcaacggcaaggagtacaagtgcaaggtgtccaacaagggcctgccctcctccatcgagaagaccatctccaaggctaagggccaacctcgggagccccaagtgtataccctccctcccagccaggaggagatgaccaagaatcaagtgagcctgacctgcctcgtgaagggattttacccctccgacatcgctgtggaatgggaaagcaatggccaacctgagaacaactacaagaccacaccccccgtgctggactccgatggctccttcttcctgtacagcaggctgaccgtggacaaatcccggtggcaagagggaaacgtgttcagctgctccgtgatgcacgaggctctccacaaccactacacccagaagagcctctccctgagcctcggctagtaa

SEQ ID NO: 1667 - DNA, 1422 bp, synthetic construct
  misc_feature 1..1422: note = 846.1H12-hIgG4(S228P) HC NT Sequence
  source 1..1422: mol_type = other DNA
atggaccccaagggcagcctgagctggagaatcctgctgttcctgagcctggccttcgagctgagctacggccagatccagttggtgcagtctggacctgagctgaagaagcctggagagacagtcaagatctcctgcaaggcttctgggtataccttcacaaactttggaatgaactgggtgaagcaggctccaggaaagggtttaaagtggatgggctggataaacacctacactggagagccatcatatgctgatgacttcaagggacggtttgccttctctttggaaacctctgccagcactgcctatttgcagatcaacaacctcaaaaatgaggacattgctacatatttctgtgcaagatgggggggttacgctggggattactatgctatggactactggggtcaaggaacctcagtcaccgtctcctcagctagcaccaagggccccagcgtgtttcctctcgctccctgcagccggagcacatccgagagcaccgctgctctgggctgtctcgtgaaggactacttccctgaacccgtcaccgtcagctggaatagcggcgccctgacatccggcgtccacacattccccgctgtcctgcagagcagcggcctgtacagcctgagctccgtggtcaccgtgcctagcagcagcctgggaacaaagacctacacctgcaacgtggaccataagccctccaacaccaaggtggacaagcgggtggaatccaagtatggacccccctgtcctccttgccctgctcctgaatttctcggaggcccctccgtcttcctgtttccccccaagcccaaggacaccctgatgatctcccggacacccgaagtcacctgcgtcgtggtggatgtcagccaggaagatcccgaggtgcagttcaactggtacgtggacggagtggaggtgcataacgccaaaaccaagcccagggaagagcagttcaacagcacctatcgggtcgtgtccgtgctcaccgtcctgcatcaggattggctcaacggcaaggagtacaagtgcaaggtgtccaacaagggcctgccctcctccatcgagaagaccatctccaaggctaagggccaacctcgggagccccaagtgtataccctccctcccagccaggaggagatgaccaagaatcaagtgagcctgacctgcctcgtgaagggattttacccctccgacatcgctgtggaatgggaaagcaatggccaacctgagaacaactacaagaccacaccccccgtgctggactccgatggctccttcttcctgtacagcaggctgaccgtggacaaatcccggtggcaagagggaaacgtgttcagctgctccgtgatgcacgaggctctccacaaccactacacccagaagagcctctccctgagcctcggctagtaa

SEQ ID NO: 1668 - DNA, 1422 bp, synthetic construct
  misc_feature 1..1422: note = 846.2H3-hIgG4(S228P)HC NT Sequence
  source 1..1422: mol_type = other DNA
atggaccccaagggcagcctgagctggagaatcctgctgttcctgagcctggccttcgagctgagctacggccagatccagttggtgcagtctggacctgagctgaagaagcctggagagacagtcaagatctcctgcaaggcttctgggtataccttcacaaactatggaatgaactgggtgaagcaggctccaggaaagggtttaaagtggatgggctggataaacacctacactggagagccatcatatgctgatgacttcaagggacggtttgccttctctttggaaacctctgccagcactgcctatttgcagatcaacaacctcaaaaatgaggacatggctacatatttctgtgcaagatgggggggttacgatggggattactatgctatggactactggggtcaaggaacctcagtcaccgtctcctcagctagcaccaagggccccagcgtgtttcctctcgctccctgcagccggagcacatccgagagcaccgctgctctgggctgtctcgtgaaggactacttccctgaacccgtcaccgtcagctggaatagcggcgccctgacatccggcgtccacacattccccgctgtcctgcagagcagcggcctgtacagcctgagctccgtggtcaccgtgcctagcagcagcctgggaacaaagacctacacctgcaacgtggaccataagccctccaacaccaaggtggacaagcgggtggaatccaagtatggacccccctgtcctccttgccctgctcctgaatttctcggaggcccctccgtcttcctgtttccccccaagcccaaggacaccctgatgatctcccggacacccgaagtcacctgcgtcgtggtggatgtcagccaggaagatcccgaggtgcagttcaactggtacgtggacggagtggaggtgcataacgccaaaaccaagcccagggaagagcagttcaacagcacctatcgggtcgtgtccgtgctcaccgtcctgcatcaggattggctcaacggcaaggagtacaagtgcaaggtgtccaacaagggcctgccctcctccatcgagaagaccatctccaaggctaagggccaacctcgggagccccaagtgtataccctccctcccagccaggaggagatgaccaagaatcaagtgagcctgacctgcctcgtgaagggattttacccctccgacatcgctgtggaatgggaaagcaatggccaacctgagaacaactacaagaccacaccccccgtgctggactccgatggctccttcttcctgtacagcaggctgaccgtggacaaatcccggtggcaagagggaaacgtgttcagctgctccgtgatgcacgaggctctccacaaccactacacccagaagagcctctccctgagcctcggctagtaa

SEQ ID NO: 1669 - DNA, 1422 bp, synthetic construct; identical to SEQ ID NO: 1668
  misc_feature 1..1422: note = 846.1F5-hIgG4(S228P)HC NT Sequence
  source 1..1422: mol_type = other DNA

SEQ ID NO: 1670 - DNA, 1422 bp, synthetic construct
  misc_feature 1..1422: note = 846T.16B5-hIgG4(S228P) HC NT Sequence
  source 1..1422: mol_type = other DNA
atggaccccaagggcagcctgagctggagaatcctgctgttcctgagcctggccttcgagctgagctacggccagatccagttggtgcagtctggacctgagctgaagaagcctggagagacagtcaagatctcctgcaaggcttctgggtataccttcacaaactatggaatgaactgggtgaagcaggctccaggaaagggtttaaagtggatgggctggataaacacctacactggagagccagcatatgctgatgacttcaagggacggtttgccttctctttggaaacctctgccagcactgcctatttgcagatcaacaacctcaaaaatgaggacatggctacatatttctgtgcaagatgggggggttacgatggggattactatgctatggactactggggtcaaggaacctcagtcaccgtctcctcagctagcaccaagggccccagcgtgtttcctctcgctccctgcagccggagcacatccgagagcaccgctgctctgggctgtctcgtgaaggactacttccctgaacccgtcaccgtcagctggaatagcggcgccctgacatccggcgtccacacattccccgctgtcctgcagagcagcggcctgtacagcctgagctccgtggtcaccgtgcctagcagcagcctgggaacaaagacctacacctgcaacgtggaccataagccctccaacaccaaggtggacaagcgggtggaatccaagtatggacccccctgtcctccttgccctgctcctgaatttctcggaggcccctccgtcttcctgtttccccccaagcccaaggacaccctgatgatctcccggacacccgaagtcacctgcgtcgtggtggatgtcagccaggaagatcccgaggtgcagttcaactggtacgtggacggagtggaggtgcataacgccaaaaccaagcccagggaagagcagttcaacagcacctatcgggtcgtgtccgtgctcaccgtcctgcatcaggattggctcaacggcaaggagtacaagtgcaaggtgtccaacaagggcctgccctcctccatcgagaagaccatctccaaggctaagggccaacctcgggagccccaagtgtataccctccctcccagccaggaggagatgaccaagaatcaagtgagcctgacctgcctcgtgaagggattttacccctccgacatcgctgtggaatgggaaagcaatggccaacctgagaacaactacaagaccacaccccccgtgctggactccgatggctccttcttcctgtacagcaggctgaccgtggacaaatcccggtggcaagagggaaacgtgttcagctgctccgtgatgcacgaggctctccacaaccactacacccagaagagcctctccctgagcctcggctagtaa

SEQ ID NO: 1671 - DNA, 1401 bp, synthetic construct
  misc_feature 1..1401: note = 20D11.2C6-hIgG4(S228P) HC NT Sequence
  source 1..1401: mol_type = other DNA
atggaccccaagggcagcctgagctggagaatcctgctgttcctgagcctggccttcgagctgagctacggcgaggtccagctgcaacaatctggacctgaactggtgaagcctggggcttcagtgaagatatcctgtaaggcttctggatacacgttcactgacttctacataaactgggtgaagcagagccatggaaagagccttgagtggattggagatattaatcctaagaatggtggtattaactacaacccgaagttcaagatcaaggccacattgactgtagacaagtcctccagcacatcctacatggacctccgcggcctgacatctgaggactctgcagtctattactgcacctcaggctacggatttccttactggggccaagggactctggtcactgtctctgcagctagcaccaagggccccagcgtgtttcctctcgctccctgcagccggagcacatccgagagcaccgctgctctgggctgtctcgtgaaggactacttccctgaacccgtcaccgtcagctggaatagcggcgccctgacatccggcgtccacacattccccgctgtcctgcagagcagcggcctgtacagcctgagctccgtggtcaccgtgcctagcagcagcctgggaacaaagacctacacctgcaacgtggaccataagccctccaacaccaaggtggacaagcgggtggaatccaagtatggacccccctgtcctccttgccctgctcctgaatttctcggaggcccctccgtcttcctgtttccccccaagcccaaggacaccctgatgatctcccggacacccgaagtcacctgcgtcgtggtggatgtcagccaggaagatcccgaggtgcagttcaactggtacgtggacggagtggaggtgcataacgccaaaaccaagcccagggaagagcagttcaacagcacctatcgggtcgtgtccgtgctcaccgtcctgcatcaggattggctcaacggcaaggagtacaagtgcaaggtgtccaacaagggcctgccctcctccatcgagaagaccatctccaaggctaagggccaacctcgggagccccaagtgtataccctccctcccagccaggaggagatgaccaagaatcaagtgagcctgacctgcctcgtgaagggattttacccctccgacatcgctgtggaatgggaaagcaatggccaacctgagaacaactacaagaccacaccccccgtgctggactccgatggctccttcttcctgtacagcaggctgaccgtggacaaatcccggtggcaagagggaaacgtgttcagctgctccgtgatgcacgaggctctccacaaccactacacccagaagagcctctccctgagcctcggctagtaa

SEQ ID NO: 1672 - DNA, 1404 bp, synthetic construct
  misc_feature 1..1404: note = 15G7.2A7-hIgG4(S228P) HC NT Sequence
  source 1..1404: mol_type = other DNA
atggaccccaagggcagcctgagctggagaatcctgctgttcctgagcctggccttcgagctgagctacggccaggtgcagctggtgcagtccggctccgagctgaaaaaacccggcgcctccgtgaaagtgtcctgcaaagcctccggctacacattcacaaactacggcatgaactgggtgaggcaggcccccggccagggcctgaaatggatgggctggatcaacacaaacacaggcgagcccacatacgtggaggagttcacaggcaggttcgtgttctccctggagacatccgtgtccacagcctacctgcagatctcctccctgaaagccgaggacacagccgtgtacttctgcgccccctacgacaacttcttcgcctactggggccagggcacaacagtgacagtgtcctccgctagcaccaagggccccagcgtgtttcctctcgctccctgcagccggagcacatccgagagcaccgctgctctgggctgtctcgtgaaggactacttccctgaacccgtcaccgtcagctggaatagcggcgccctgacatccggcgtccacacattccccgctgtcctgcagagcagcggcctgtacagcctgagctccgtggtcaccgtgcctagcagcagcctgggaacaaagacctacacctgcaacgtggaccataagccctccaacaccaaggtggacaagcgggtggaatccaagtatggacccccctgtcctccttgccctgctcctgaatttctcggaggcccctccgtcttcctgtttccccccaagcccaaggacaccctgatgatctcccggacacccgaagtcacctgcgtcgtggtggatgtcagccaggaagatcccgaggtgcagttcaactggtacgtggacggagtggaggtgcataacgccaaaaccaagcccagggaagagcagttcaacagcacctatcgggtcgtgtccgtgctcaccgtcctgcatcaggattggctcaacggcaaggagtacaagtgcaaggtgtccaacaagggcctgccctcctccatcgagaagaccatctccaaggctaagggccaacctcgggagccccaagtgtataccctccctcccagccaggaggagatgaccaagaatcaagtgagcctgacctgcctcgtgaagggattttacccctccgacatcgctgtggaatgggaaagcaatggccaacctgagaacaactacaagaccacaccccccgtgctggactccgatggctccttcttcctgtacagcaggctgaccgtggacaaatcccggtggcaagagggaaacgtgttcagctgctccgtgatgcacgaggctctccacaaccactacacccagaagagcctctccctgagcctcggctagtaa

SEQ ID NO: 1673 - DNA, 1413 bp, synthetic construct
  misc_feature 1..1413: note = IMT001-4-HCLC (TB001) HC NT Sequence
  source 1..1413: mol_type = other DNA
atggaccccaagggcagcctgagctggagaatcctgctgttcctgagcctggccttcgagctgagctacggccagatccagttggtgcagtctggacctgagctgaagaagcctggagagacagtcaagatctcctgcaaggcttctgggtataccttcacaaactatggaatgaactgggtgaagcaggctccaggaaagggtttaaagtggatgggctggataaacacctacactggagagccaacatatgttgatgacttcaagggacggtttgccttctctttggaaacctctgccagcactgcctatttgcggatcaacaacctcaaaaatgaggacacggctacatatttctgtgcaaagtttggtaactacgtgggagctatggactactggggtcaaggaacctcagtcaccgtctcctcagctagcaccaagggccccagcgtgtttcctctcgctccctgcagccggagcacatccgagagcaccgctgctctgggctgtctcgtgaaggactacttccctgaacccgtcaccgtcagctggaatagcggcgccctgacatccggcgtccacacattccccgctgtcctgcagagcagcggcctgtacagcctgagctccgtggtcaccgtgcctagcagcagcctgggaacaaagacctacacctgcaacgtggaccataagccctccaacaccaaggtggacaagcgggtggaatccaagtatggacccccctgtcctccttgccctgctcctgaatttctcggaggcccctccgtcttcctgtttccccccaagcccaaggacaccctgatgatctcccggacacccgaagtcacctgcgtcgtggtggatgtcagccaggaagatcccgaggtgcagttcaactggtacgtggacggagtggaggtgcataacgccaaaaccaagcccagggaagagcagttcaacagcacctatcgggtcgtgtccgtgctcaccgtcctgcatcaggattggctcaacggcaaggagtacaagtgcaaggtgtccaacaagggcctgccctcctccatcgagaagaccatctccaaggctaagggccaacctcgggagccccaagtgtataccctccctcccagccaggaggagatgaccaagaatcaagtgagcctgacctgcctcgtgaagggattttacccctccgacatcgctgtggaatgggaaagcaatggccaacctgagaacaactacaagaccacaccccccgtgctggactccgatggctccttcttcctgtacagcaggctgaccgtggacaaatcccggtggcaagagggaaacgtgttcagctgctccgtgatgcacgaggctctccacaaccactacacccagaagagcctctccctgagcctcggctagtaa

SEQ ID NO: 1674 - DNA, 1398 bp, synthetic construct
  misc_feature 1..1398: note = 846T.14A2-hIgG4(S338P) HC NT Sequence
  source 1..1398: mol_type = other DNA
atggaccccaagggcagcctgagctggagaatcctgctgttcctgagcctggccttcgagctgagctacggccagatccagttggtgcagtctggacctgagctgaagaagcctggagagacagtcaagatctcctgcaaggcttctgggtataccttcacaaactatggaatgaactgggtgaagcaggctccaggaaagggtttaaagtggatgggctggataaacacctacactggagagccaacatatgctggtgacctcaagggacggtttgccttctctttggaaacctctgccagcactgcctatttgcagatcaacaacctcaaaaatgaggacacggctacatatttctgtgtaagatatactatggactactggggtcaaggaacctcagtcaccgtctcctcagctagcaccaagggccccagcgtgtttcctctcgctccctgcagccggagcacatccgagagcaccgctgctctgggctgtctcgtgaaggactacttccctgaacccgtcaccgtcagctggaatagcggcgccctgacatccggcgtccacacattccccgctgtcctgcagagcagcggcctgtacagcctgagctccgtggtcaccgtgcctagcagcagcctgggaacaaagacctacacctgcaacgtggaccataagccctccaacaccaaggtggacaagcgggtggaatccaagtatggacccccctgtcctccttgccctgctcctgaatttctcggaggcccctccgtcttcctgtttccccccaagcccaaggacaccctgatgatctcccggacacccgaagtcacctgcgtcgtggtggatgtcagccaggaagatcccgaggtgcagttcaactggtacgtggacggagtggaggtgcataacgccaaaaccaagcccagggaagagcagttcaacagcacctatcgggtcgtgtccgtgctcaccgtcctgcatcaggattggctcaacggcaaggagtacaagtgcaaggtgtccaacaagggcctgccctcctccatcgagaagaccatctccaaggctaagggccaacctcgggagccccaagtgtataccctccctcccagccaggaggagatgaccaagaatcaagtgagcctgacctgcctcgtgaagggattttacccctccgacatcgctgtggaatgggaaagcaatggccaacctgagaacaactacaagaccacaccccccgtgctggactccgatggctccttcttcctgtacagcaggctgaccgtggacaaatcccggtggcaagagggaaacgtgttcagctgctccgtgatgcacgaggctctccacaaccactacacccagaagagcctctccctgagcctcggctagtaa

SEQ ID NO: 1675 - DNA, 1404 bp, synthetic construct
  misc_feature 1..1404: note = 798-9.20H5.A3-mH1mL0-hIgG4(S228P) HC NT Sequence
  source 1..1404: mol_type = other DNA
atggaccccaagggcagcctgagctggagaatcctgctgttcctgagcctggccttcgagctgagctacggccagatccagttggtacagtctggacctgagctgaagaagcctggagagtcagtcaagatctcctgcaaggcttctggttatgccttcacaacctatggaatgagctgggtgcaacaggctccaggaaagggtttaaagtggatgggctgggtaaacacctactctggagtgccaacatatgctgatgacttcaagggacggtttgccttctctttggaaacctctgccagcactgcctatttgcagatcaacaacctcagaaatgaggacacggctacatatttctgtgcaagagggccctatgctatggactactggggtcaaggaacctcagtcaccgtctcctcagctagcaccaagggccccagcgtgtttcctctcgctccctgcagccggagcacatccgagagcaccgctgctctgggctgtctcgtgaaggactacttccctgaacccgtcaccgtcagctggaatagcggcgccctgacatccggcgtccacacattccccgctgtcctgcagagcagcggcctgtacagcctgagctccgtggtcaccgtgcctagcagcagcctgggaacaaagacctacacctgcaacgtggaccataagccctccaacaccaaggtggacaagcgggtggaatccaagtatggacccccctgtcctccttgccctgctcctgaatttctcggaggcccctccgtcttcctgtttccccccaagcccaaggacaccctgatgatctcccggacacccgaagtcacctgcgtcgtggtggatgtcagccaggaagatcccgaggtgcagttcaactggtacgtggacggagtggaggtgcataacgccaaaaccaagcccagggaagagcagttcaacagcacctatcgggtcgtgtccgtgctcaccgtcctgcatcaggattggctcaacggcaaggagtacaagtgcaaggtgtccaacaagggcctgccctcctccatcgagaagaccatctccaaggctaagggccaacctcgggagccccaagtgtataccctccctcccagccaggaggagatgaccaagaatcaagtgagcctgacctgcctcgtgaagggattttacccctccgacatcgctgtggaatgggaaagcaatggccaacctgagaacaactacaagaccacaccccccgtgctggactccgatggctccttcttcctgtacagcaggctgaccgtggacaaatcccggtggcaagagggaaacgtgttcagctgctccgtgatgcacgaggctctccacaaccactacacccagaagagcctctccctgagcctcggctagtaa

SEQ ID NO: 1676 - DNA, 1398 bp, synthetic construct
  misc_feature 1..1398: note = F847C.21H6-hIgG4(S228P) HC NT Sequence
  source 1..1398: mol_type = other DNA
atggaccccaagggcagcctgagctggagaatcctgctgttcctgagcctggccttcgagctgagctacggccagatccagcttgtacagtctgggcctgaacttaaaaagcccggggaaacagtgaagatctcctgtaaggcttctgggtacacttttacgatctttggaatgaactgggtcaagcaggctcccggaaaaggtctgaagtggatgggctgggtgaatacatacacgggggaacccacctatgctgacgattttaaggggcggttcgctttctctctcgaaaccagcgcgagtacagcatacttacagatcaacaacttgaagaacgaagatacagctacgtatttctgtgctagagggtggttcgcgtattgggggcaaggcactctcgtcaccgtatccgccgctagcaccaagggccccagcgtgtttcctctcgctccctgcagccggagcacatccgagagcaccgctgctctgggctgtctcgtgaaggactacttccctgaacccgtcaccgtcagctggaatagcggcgccctgacatccggcgtccacacattccccgctgtcctgcagagcagcggcctgtacagcctgagctccgtggtcaccgtgcctagcagcagcctgggaacaaagacctacacctgcaacgtggaccataagccctccaacaccaaggtggacaagcgggtggaatccaagtatggacccccctgtcctccttgccctgctcctgaatttctcggaggcccctccgtcttcctgtttccccccaagcccaaggacaccctgatgatctcccggacacccgaagtcacctgcgtcgtggtggatgtcagccaggaagatcccgaggtgcagttcaactggtacgtggacggagtggaggtgcataacgccaaaaccaagcccagggaagagcagttcaacagcacctatcgggtcgtgtccgtgctcaccgtcctgcatcaggattggctcaacggcaaggagtacaagtgcaaggtgtccaacaagggcctgccctcctccatcgagaagaccatctccaaggctaagggccaacctcgggagccccaagtgtataccctccctcccagccaggaggagatgaccaagaatcaagtgagcctgacctgcctcgtgaagggattttacccctccgacatcgctgtggaatgggaaagcaatggccaacctgagaacaactacaagaccacaccccccgtgctggactccgatggctccttcttcctgtacagcaggctgaccgtggacaaatcccggtggcaagagggaaacgtgttcagctgctccgtgatgcacgaggctctccacaaccactacacccagaagagcctctccctgagcctcggctagtaa

SEQ ID NO: 1677 - DNA, 1407 bp, synthetic construct
  misc_feature 1..1407: note = 798-9.19D9.2E5-hIgG4(S228P)-mV2 HC NT Sequence
  source 1..1407: mol_type = other DNA
atggaccccaagggcagcctgagctggagaatcctgctgttcctgagcctggccttcgagctgagctacggccagatccagttggtacagtctggacctgagctgaagaagcctggagagacagtcaagatctcctgcaaggcttctggatataccttcacaacctatggaatgggctgggtgaaacaggctccaggaaagggtttgaagtggatgggctggataaacacctactctggcgtgccaacatatgctgatgacttcaagggacggtttgccttctctttggaaacctctaccagcactgcctatttgcagatcaacaacctcaaaaatgaggacatggctacatatttctgtgcaaccccttatgaatacgacggggcttactggggccaagggactctggtcactgtctctgcagctagcaccaagggccccagcgtgtttcctctcgctccctgcagccggagcacatccgagagcaccgctgctctgggctgtctcgtgaaggactacttccctgaacccgtcaccgtcagctggaatagcggcgccctgacatccggcgtccacacattccccgctgtcctgcagagcagcggcctgtacagcctgagctccgtggtcaccgtgcctagcagcagcctgggaacaaagacctacacctgcaacgtggaccataagccctccaacaccaaggtggacaagcgggtggaatccaagtatggacccccctgtcctccttgccctgctcctgaatttctcggaggcccctccgtcttcctgtttccccccaagcccaaggacaccctgatgatctcccggacacccgaagtcacctgcgtcgtggtggatgtcagccaggaagatcccgaggtgcagttcaactggtacgtggacggagtggaggtgcataacgccaaaaccaagcccagggaagagcagttcaacagcacctatcgggtcgtgtccgtgctcaccgtcctgcatcaggattggctcaacggcaaggagtacaagtgcaaggtgtccaacaagggcctgccctcctccatcgagaagaccatctccaaggctaagggccaacctcgggagccccaagtgtataccctccctcccagccaggaggagatgaccaagaatcaagtgagcctgacctgcctcgtgaagggattttacccctccgacatcgctgtggaatgggaaagcaatggccaacctgagaacaactacaagaccacaccccccgtgctggactccgatggctccttcttcctgtacagcaggctgaccgtggacaaatcccggtggcaagagggaaacgtgttcagctgctccgtgatgcacgaggctctccacaaccactacacccagaagagcctctccctgagcctcggctagtaa

SEQ ID NO: 1678 - protein, 473 aa, synthetic construct
  REGION 1..473: note = 4A11-VH3-hIgG4(S228P)-VL1 (TB006) HC AA Sequence w/SS
MDPKGSLSWRILLFLSLAFELSYGQVQLVQSGSELKKPGASVKVSCKASGYTFTEYTIHWVRQAPGQGLEWMGWFYPGSDNINYNEGFTGRFVLSADKSVSTAYLQICSLKAEDTAVYFCARHEEGVITTVSYFDYWGQGTLVTVSSASTKGPSVFPLAPCSRSTSESTAALGCLVKDYFPEPVTVSWNSGALTSGVHTFPAVLQSSGLYSLSSVVTVPSSSLGTKTYTCNVDHKPSNTKVDKRVESKYGPPCPPCPAPEFLGGPSVFLFPPKPKDTLMISRTPEVTCVVVDVSQEDPEVQFNWYVDGVEVHNAKTKPREEQFNSTYRVVSVLTVLHQDWLNGKEYKCKVSNKGLPSSIEKTISKAKGQPREPQVYTLPPSQEEMTKNQVSLTCLVKGFYPSDIAVEWESNGQPENNYKTTPPVLDSDGSFFLYSRLTVDKSRWQEGNVFSCSVMHEALHNHYTQKSLSLSLG

SEQ ID NO: 1679 - protein, 466 aa, synthetic construct
  REGION 1..466: note = 13H12-VH3-hIgG4(S228P)-VL1 HC AA Sequence w/SS
MDPKGSLSWRILLFLSLAFELSYGQVQLVQSGAEVKKPGASVKVSCKASGYSFTNYYMHWVRQAPGQRLEWMGWIYPGSGNTNYNEKFQGRVTITADTSASTAYMELSSLRSEDTAVYYCSTAPGGFDVWGQGTTVTVSSASTKGPSVFPLAPCSRSTSESTAALGCLVKDYFPEPVTVSWNSGALTSGVHTFPAVLQSSGLYSLSSVVTVPSSSLGTKTYTCNVDHKPSNTKVDKRVESKYGPPCPPCPAPEFLGGPSVFLFPPKPKDTLMISRTPEVTCVVVDVSQEDPEVQFNWYVDGVEVHNAKTKPREEQFNSTYRVVSVLTVLHQDWLNGKEYKCKVSNKGLPSSIEKTISKAKGQPREPQVYTLPPSQEEMTKNQVSLTCLVKGFYPSDIAVEWESNGQPENNYKTTPPVLDSDGSFFLYSRLTVDKSRWQEGNVFSCSVMHEALHNHYTQKSLSLSLG

SEQ ID NO: 1680 - protein, 466 aa, synthetic construct
  REGION 1..466: note = 19B5-H1L1-hIgG4(S228P) HC AA Sequence w/SS
MDPKGSLSWRILLFLSLAFELSYGQVQLVQSGSELKKPGASVKVSCKASGYTFTTYAMSWVRQAPGQGLEWMGWINTYSGVPTYADDFTGRFVFSLETSVSTAYLQISSLKAEDTAVYFCARGPYAMDYWGQGTLVTVSSASTKGPSVFPLAPCSRSTSESTAALGCLVKDYFPEPVTVSWNSGALTSGVHTFPAVLQSSGLYSLSSVVTVPSSSLGTKTYTCNVDHKPSNTKVDKRVESKYGPPCPPCPAPEFLGGPSVFLFPPKPKDTLMISRTPEVTCVVVDVSQEDPEVQFNWYVDGVEVHNAKTKPREEQFNSTYRVVSVLTVLHQDWLNGKEYKCKVSNKGLPSSIEKTISKAKGQPREPQVYTLPPSQEEMTKNQVSLTCLVKGFYPSDIAVEWESNGQPENNYKTTPPVLDSDGSFFLYSRLTVDKSRWQEGNVFSCSVMHEALHNHYTQKSLSLSLG

SEQ ID NO: 1681 - protein, 467 aa, synthetic construct
  REGION 1..467: note = 14H10.2C9-hIgG4(S228P) HC AA Sequence w/SS
MDPKGSLSWRILLFLSLAFELSYGQIQLVQSGPELKKPGETVKISCKASGYTFTTYGMGWVKQAPGKDLKWMGWINTYSGVPTYADDFKGRFAFSLETSASTAYLQISNLKNEDTATYFCSTPYEYDGAYWGQGTLVTVSAASTKGPSVFPLAPCSRSTSESTAALGCLVKDYFPEPVTVSWNSGALTSGVHTFPAVLQSSGLYSLSSVVTVPSSSLGTKTYTCNVDHKPSNTKVDKRVESKYGPPCPPCPAPEFLGGPSVFLFPPKPKDTLMISRTPEVTCVVVDVSQEDPEVQFNWYVDGVEVHNAKTKPREEQFNSTYRVVSVLTVLHQDWLNGKEYKCKVSNKGLPSSIEKTISKAKGQPREPQVYTLPPSQEEMTKNQVSLTCLVKGFYPSDIAVEWESNGQPENNYKTTPPVLDSDGSFFLYSRLTVDKSRWQEGNVFSCSVMHEALHNHYTQKSLSLSLG

SEQ ID NO: 1682 - protein, 465 aa, synthetic construct
  REGION 1..465: note = 15G7.2A7-hIgG4(S228P) HC AA Sequence w/SS
MDPKGSLSWRILLFLSLAFELSYGEVQLQQSGPELVKPGASVKISCKASGYTFTDYYMNWVKQSHGKSLEWIGDINPNNGGTNYNQKFKGKATLTVDKSSSTAYMELRSLTSEDSAVYYCTSGYGFPYWGQGTLVTVSAASTKGPSVFPLAPCSRSTSESTAALGCLVKDYFPEPVTVSWNSGALTSGVHTFPAVLQSSGLYSLSSVVTVPSSSLGTKTYTCNVDHKPSNTKVDKRVESKYGPPCPPCPAPEFLGGPSVFLFPPKPKDTLMISRTPEVTCVVVDVSQEDPEVQFNWYVDGVEVHNAKTKPREEQFNSTYRVVSVLTVLHQDWLNGKEYKCKVSNKGLPSSIEKTISKAKGQPREPQVYTLPPSQEEMTKNQVSLTCLVKGFYPSDIAVEWESNGQPENNYKTTPPVLDSDGSFFLYSRLTVDKSRWQEGNVFSCSVMHEALHNHYTQKSLSLSLG

SEQ ID NO: 1683 - protein, 470 aa, synthetic construct
  REGION 1..470: note = MOPC21-hIgG4(S228P) HC AA Sequence w/SS
MDPKGSLSWRILLFLSLAFELSYGDVQLVESGGGLVQPGGSRKLSCAASGFTFSSFGMHWVRQAPEKGLEWVAYISSGSSTLHYADTVKGRFTISRDNPKNTLFLQMTSLRSEDTGMYYCARWGNYPYYAMDYWGQGTSVTVSSASTKGPSVFPLAPCSRSTSESTAALGCLVKDYFPEPVTVSWNSGALTSGVHTFPAVLQSSGLYSLSSVVTVPSSSLGTKTYTCNVDHKPSNTKVDKRVESKYGPPCPPCPAPEFLGGPSVFLFPPKPKDTLMISRTPEVTCVVVDVSQEDPEVQFNWYVDGVEVHNAKTKPREEQFNSTYRVVSVLTVLHQDWLNGKEYKCKVSNKGLPSSIEKTISKAKGQPREPQVYTLPPSQEEMTKNQVSLTCLVKGFYPSDIAVEWESNGQPENNYKTTPPVLDSDGSFFLYSRLTVDKSRWQEGNVFSCSVMHEALHNHYTQKSLSLSLG

SEQ ID NO: 1684 - protein, 472 aa, synthetic construct
  REGION 1..472: note = 846.1H12-hIgG4(S228P) HC AA Sequence w/SS
MDPKGSLSWRILLFLSLAFELSYGQIQLVQSGPELKKPGETVKISCKASGYTFTNFGMNWVKQAPGKGLKWMGWINTYTGEPSYADDFKGRFAFSLETSASTAYLQINNLKNEDIATYFCARWGGYAGDYYAMDYWGQGTSVTVSSASTKGPSVFPLAPCSRSTSESTAALGCLVKDYFPEPVTVSWNSGALTSGVHTFPAVLQSSGLYSLSSVVTVPSSSLGTKTYTCNVDHKPSNTKVDKRVESKYGPPCPPCPAPEFLGGPSVFLFPPKPKDTLMISRTPEVTCVVVDVSQEDPEVQFNWYVDGVEVHNAKTKPREEQFNSTYRVVSVLTVLHQDWLNGKEYKCKVSNKGLPSSIEKTISKAKGQPREPQVYTLPPSQEEMTKNQVSLTCLVKGFYPSDIAVEWESNGQPENNYKTTPPVLDSDGSFFLYSRLTVDKSRWQEGNVFSCSVMHEALHNHYTQKSLSLSLG

SEQ ID NO: 1685 - protein, 472 aa, synthetic construct
  REGION 1..472: note = 846.2H3-hIgG4(S228P)HC AA Sequence w/SS
MDPKGSLSWRILLFLSLAFELSYGQIQLVQSGPELKKPGETVKISCKASGYTFTNYGMNWVKQAPGKGLKWMGWINTYTGEPSYADDFKGRFAFSLETSASTAYLQINNLKNEDMATYFCARWGGYDGDYYAMDYWGQGTSVTVSSASTKGPSVFPLAPCSRSTSESTAALGCLVKDYFPEPVTVSWNSGALTSGVHTFPAVLQSSGLYSLSSVVTVPSSSLGTKTYTCNVDHKPSNTKVDKRVESKYGPPCPPCPAPEFLGGPSVFLFPPKPKDTLMISRTPEVTCVVVDVSQEDPEVQFNWYVDGVEVHNAKTKPREEQFNSTYRVVSVLTVLHQDWLNGKEYKCKVSNKGLPSSIEKTISKAKGQPREPQVYTLPPSQEEMTKNQVSLTCLVKGFYPSDIAVEWESNGQPENNYKTTPPVLDSDGSFFLYSRLTVDKSRWQEGNVFSCSVMHEALHNHYTQKSLSLSLG

SEQ ID NO: 1686 - protein, 472 aa, synthetic construct; identical to SEQ ID NO: 1685
  REGION 1..472: note = 846.1F5-hIgG4(S228P)HC AA Sequence w/SS

SEQ ID NO: 1687 - protein, 472 aa, synthetic construct
  REGION 1..472: note = 846T.16B5-hIgG4(S228P) HC AA Sequence w/SS
MDPKGSLSWRILLFLSLAFELSYGQIQLVQSGPELKKPGETVKISCKASGYTFTNYGMNWVKQAPGKGLKWMGWINTYTGEPAYADDFKGRFAFSLETSASTAYLQINNLKNEDMATYFCARWGGYDGDYYAMDYWGQGTSVTVSSASTKGPSVFPLAPCSRSTSESTAALGCLVKDYFPEPVTVSWNSGALTSGVHTFPAVLQSSGLYSLSSVVTVPSSSLGTKTYTCNVDHKPSNTKVDKRVESKYGPPCPPCPAPEFLGGPSVFLFPPKPKDTLMISRTPEVTCVVVDVSQEDPEVQFNWYVDGVEVHNAKTKPREEQFNSTYRVVSVLTVLHQDWLNGKEYKCKVSNKGLPSSIEKTISKAKGQPREPQVYTLPPSQEEMTKNQVSLTCLVKGFYPSDIAVEWESNGQPENNYKTTPPVLDSDGSFFLYSRLTVDKSRWQEGNVFSCSVMHEALHNHYTQKSLSLSLG

SEQ ID NO: 1688 - protein, 465 aa, synthetic construct
  REGION 1..465: note = 20D11.2C6-hIgG4(S228P) HC AA Sequence w/SS
MDPKGSLSWRILLFLSLAFELSYGEVQLQQSGPELVKPGASVKISCKASGYTFTDFYINWVKQSHGKSLEWIGDINPKNGGINYNPKFKIKATLTVDKSSSTSYMDLRGLTSEDSAVYYCTSGYGFPYWGQGTLVTVSAASTKGPSVFPLAPCSRSTSESTAALGCLVKDYFPEPVTVSWNSGALTSGVHTFPAVLQSSGLYSLSSVVTVPSSSLGTKTYTCNVDHKPSNTKVDKRVESKYGPPCPPCPAPEFLGGPSVFLFPPKPKDTLMISRTPEVTCVVVDVSQEDPEVQFNWYVDGVEVHNAKTKPREEQFNSTYRVVSVLTVLHQDWLNGKEYKCKVSNKGLPSSIEKTISKAKGQPREPQVYTLPPSQEEMTKNQVSLTCLVKGFYPSDIAVEWESNGQPENNYKTTPPVLDSDGSFFLYSRLTVDKSRWQEGNVFSCSVMHEALHNHYTQKSLSLSLG

SEQ ID NO: 1689 - protein, 466 aa, synthetic construct
  REGION 1..466: note = 15G7.2A7-hIgG4(S228P) HC AA Sequence w/SS
MDPKGSLSWRILLFLSLAFELSYGQVQLVQSGSELKKPGASVKVSCKASGYTFTNYGMNWVRQAPGQGLKWMGWINTNTGEPTYVEEFTGRFVFSLETSVSTAYLQISSLKAEDTAVYFCAPYDNFFAYWGQGTTVTVSSASTKGPSVFPLAPCSRSTSESTAALGCLVKDYFPEPVTVSWNSGALTSGVHTFPAVLQSSGLYSLSSVVTVPSSSLGTKTYTCNVDHKPSNTKVDKRVESKYGPPCPPCPAPEFLGGPSVFLFPPKPKDTLMISRTPEVTCVVVDVSQEDPEVQFNWYVDGVEVHNAKTKPREEQFNSTYRVVSVLTVLHQDWLNGKEYKCKVSNKGLPSSIEKTISKAKGQPREPQVYTLPPSQEEMTKNQVSLTCLVKGFYPSDIAVEWESNGQPENNYKTTPPVLDSDGSFFLYSRLTVDKSRWQEGNVFSCSVMHEALHNHYTQKSLSLSLG

SEQ ID NO: 1690 - protein, 469 aa, synthetic construct
  REGION 1..469: note = IMT001-4-HCLC (TB001) HC AA Sequence w/SS
MDPKGSLSWRILLFLSLAFELSYGQIQLVQSGPELKKPGETVKISCKASGYTFTNYGMNWVKQAPGKGLKWMGWINTYTGEPTYVDDFKGRFAFSLETSASTAYLRINNLKNEDTATYFCAKFGNYVGAMDYWGQGTSVTVSSASTKGPSVFPLAPCSRSTSESTAALGCLVKDYFPEPVTVSWNSGALTSGVHTFPAVLQSSGLYSLSSVVTVPSSSLGTKTYTCNVDHKPSNTKVDKRVESKYGPPCPPCPAPEFLGGPSVFLFPPKPKDTLMISRTPEVTCVVVDVSQEDPEVQFNWYVDGVEVHNAKTKPREEQFNSTYRVVSVLTVLHQDWLNGKEYKCKVSNKGLPSSIEKTISKAKGQPREPQVYTLPPSQEEMTKNQVSLTCLVKGFYPSDIAVEWESNGQPENNYKTTPPVLDSDGSFFLYSRLTVDKSRWQEGNVFSCSVMHEALHNHYTQKSLSLSLG

SEQ ID NO: 1691 - protein, 464 aa, synthetic construct
  REGION 1..464: note = 846T.14A2-hIgG4(S338P) HC AA Sequence w/SS
MDPKGSLSWRILLFLSLAFELSYGQIQLVQSGPELKKPGETVKISCKASGYTFTNYGMNWVKQAPGKGLKWMGWINTYTGEPTYAGDLKGRFAFSLETSASTAYLQINNLKNEDTATYFCVRYTMDYWGQGTSVTVSSASTKGPSVFPLAPCSRSTSESTAALGCLVKDYFPEPVTVSWNSGALTSGVHTFPAVLQSSGLYSLSSVVTVPSSSLGTKTYTCNVDHKPSNTKVDKRVESKYGPPCPPCPAPEFLGGPSVFLFPPKPKDTLMISRTPEVTCVVVDVSQEDPEVQFNWYVDGVEVHNAKTKPREEQFNSTYRVVSVLTVLHQDWLNGKEYKCKVSNKGLPSSIEKTISKAKGQPREPQVYTLPPSQEEMTKNQVSLTCLVKGFYPSDIAVEWESNGQPENNYKTTPPVLDSDGSFFLYSRLTVDKSRWQEGNVFSCSVMHEALHNHYTQKSLSLSLG

SEQ ID NO: 1692 - protein, 466 aa, synthetic construct
  REGION 1..466: note = 798-9.20H5.A3-mH1mL0-hIgG4(S228P) HC AA Sequence w/SS
MDPKGSLSWRILLFLSLAFELSYGQIQLVQSGPELKKPGESVKISCKASGYAFTTYGMSWVQQAPGKGLKWMGWVNTYSGVPTYADDFKGRFAFSLETSASTAYLQINNLRNEDTATYFCARGPYAMDYWGQGTSVTVSSASTKGPSVFPLAPCSRSTSESTAALGCLVKDYFPEPVTVSWNSGALTSGVHTFPAVLQSSGLYSLSSVVTVPSSSLGTKTYTCNVDHKPSNTKVDKRVESKYGPPCPPCPAPEFLGGPSVFLFPPKPKDTLMISRTPEVTCVVVDVSQEDPEVQFNWYVDGVEVHNAKTKPREEQFNSTYRVVSVLTVLHQDWLNGKEYKCKVSNKGLPSSIEKTISKAKGQPREPQVYTLPPSQEEMTKNQVSLTCLVKGFYPSDIAVEWESNGQPENNYKTTPPVLDSDGSFFLYSRLTVDKSRWQEGNVFSCSVMHEALHNHYTQKSLSLSLG

SEQ ID NO: 1693 - protein, 464 aa, synthetic construct
  REGION 1..464: note = F847C.21H6-hIgG4(S228P) HC AA Sequence w/SS
MDPKGSLSWRILLFLSLAFELSYGQIQLVQSGPELKKPGETVKISCKASGYTFTIFGMNWVKQAPGKGLKWMGWVNTYTGEPTYADDFKGRFAFSLETSASTAYLQINNLKNEDTATYFCARGWFAYWGQGTLVTVSAASTKGPSVFPLAPCSRSTSESTAALGCLVKDYFPEPVTVSWNSGALTSGVHTFPAVLQSSGLYSLSSVVTVPSSSLGTKTYTCNVDHKPSNTKVDKRVESKYGPPCPPCPAPEFLGGPSVFLFPPKPKDTLMISRTPEVTCVVVDVSQEDPEVQFNWYVDGVEVHNAKTKPREEQFNSTYRVVSVLTVLHQDWLNGKEYKCKVSNKGLPSSIEKTISKAKGQPREPQVYTLPPSQEEMTKNQVSLTCLVKGFYPSDIAVEWESNGQPENNYKTTPPVLDSDGSFFLYSRLTVDKSRWQEGNVFSCSVMHEALHNHYTQKSLSLSLG

SEQ ID NO: 1694 - protein, 467 aa, synthetic construct
  REGION 1..467: note = 798-9.19D9.2E5-hIgG4(S228P)-mV2 HC AA Sequence w/SS
MDPKGSLSWRILLFLSLAFELSYGQIQLVQSGPELKKPGETVKISCKASGYTFTTYGMGWVKQAPGKGLKWMGWINTYSGVPTYADDFKGRFAFSLETSTSTAYLQINNLKNEDMATYFCATPYEYDGAYWGQGTLVTVSAASTKGPSVFPLAPCSRSTSESTAALGCLVKDYFPEPVTVSWNSGALTSGVHTFPAVLQSSGLYSLSSVVTVPSSSLGTKTYTCNVDHKPSNTKVDKRVESKYGPPCPPCPAPEFLGGPSVFLFPPKPKDTLMISRTPEVTCVVVDVSQEDPEVQFNWYVDGVEVHNAKTKPREEQFNSTYRVVSVLTVLHQDWLNGKEYKCKVSNKGLPSSIEKTISKAKGQPREPQVYTLPPSQEEMTKNQVSLTCLVKGFYPSDIAVEWESNGQPENNYKTTPPVLDSDGSFFLYSRLTVDKSRWQEGNVFSCSVMHEALHNHYTQKSLSLSLG

SEQ ID NO: 1695 - protein, 449 aa, synthetic construct
  REGION 1..449: note = 4A11-VH3-hIgG4(S228P)-VL1 (TB006) HC AA Sequence w/o SS
QVQLVQSGSELKKPGASVKVSCKASGYTFTEYTIHWVRQAPGQGLEWMGWFYPGSDNINYNEGFTGRFVLSADKSVSTAYLQICSLKAEDTAVYFCARHEEGVITTVSYFDYWGQGTLVTVSSASTKGPSVFPLAPCSRSTSESTAALGCLVKDYFPEPVTVSWNSGALTSGVHTFPAVLQSSGLYSLSSVVTVPSSSLGTKTYTCNVDHKPSNTKVDKRVESKYGPPCPPCPAPEFLGGPSVFLFPPKPKDTLMISRTPEVTCVVVDVSQEDPEVQFNWYVDGVEVHNAKTKPREEQFNSTYRVVSVLTVLHQDWLNGKEYKCKVSNKGLPSSIEKTISKAKGQPREPQVYTLPPSQEEMTKNQVSLTCLVKGFYPSDIAVEWESNGQPENNYKTTPPVLDSDGSFFLYSRLTVDKSRWQEGNVFSCSVMHEALHNHYTQKSLSLSLG

SEQ ID NO: 1696 - protein, 442 aa, synthetic construct; identical to SEQ ID NO: 449
  REGION 1..442: note = 13H12-VH3-hIgG4(S228P)-VL1 HC AA Sequence w/o SS

SEQ ID NO: 1697 - protein, 442 aa, synthetic construct
  REGION 1..442: note = 19B5-H1L1-hIgG4(S228P) HC AA Sequence w/o SS
QVQLVQSGSELKKPGASVKVSCKASGYTFTTYAMSWVRQAPGQGLEWMGWINTYSGVPTYADDFTGRFVFSLETSVSTAYLQISSLKAEDTAVYFCARGPYAMDYWGQGTLVTVSSASTKGPSVFPLAPCSRSTSESTAALGCLVKDYFPEPVTVSWNSGALTSGVHTFPAVLQSSGLYSLSSVVTVPSSSLGTKTYTCNVDHKPSNTKVDKRVESKYGPPCPPCPAPEFLGGPSVFLFPPKPKDTLMISRTPEVTCVVVDVSQEDPEVQFNWYVDGVEVHNAKTKPREEQFNSTYRVVSVLTVLHQDWLNGKEYKCKVSNKGLPSSIEKTISKAKGQPREPQVYTLPPSQEEMTKNQVSLTCLVKGFYPSDIAVEWESNGQPENNYKTTPPVLDSDGSFFLYSRLTVDKSRWQEGNVFSCSVMHEALHNHYTQKSLSLSLG

SEQ ID NO: 1698 - protein, 443 aa, synthetic construct
  REGION 1..443: note = 14H10.2C9-hIgG4(S228P) HC AA Sequence w/o SS
QIQLVQSGPELKKPGETVKISCKASGYTFTTYGMGWVKQAPGKDLKWMGWINTYSGVPTYADDFKGRFAFSLETSASTAYLQISNLKNEDTATYFCSTPYEYDGAYWGQGTLVTVSAASTKGPSVFPLAPCSRSTSESTAALGCLVKDYFPEPVTVSWNSGALTSGVHTFPAVLQSSGLYSLSSVVTVPSSSLGTKTYTCNVDHKPSNTKVDKRVESKYGPPCPPCPAPEFLGGPSVFLFPPKPKDTLMISRTPEVTCVVVDVSQEDPEVQFNWYVDGVEVHNAKTKPREEQFNSTYRVVSVLTVLHQDWLNGKEYKCKVSNKGLPSSIEKTISKAKGQPREPQVYTLPPSQEEMTKNQVSLTCLVKGFYPSDIAVEWESNGQPENNYKTTPPVLDSDGSFFLYSRLTVDKSRWQEGNVFSCSVMHEALHNHYTQKSLSLSLG

SEQ ID NO: 1699 - protein, 441 aa, synthetic construct; identical to SEQ ID NO: 471
  REGION 1..441: note = 15G7.2A7-hIgG4(S228P) HC AA Sequence w/o SS

SEQ ID NO: 1700 - protein, 446 aa, synthetic construct
  REGION 1..446: note = MOPC21-hIgG4(S228P) HC AA Sequence w/o SS
DVQLVESGGGLVQPGGSRKLSCAASGFTFSSFGMHWVRQAPEKGLEWVAYISSGSSTLHYADTVKGRFTISRDNPKNTLFLQMTSLRSEDTGMYYCARWGNYPYYAMDYWGQGTSVTVSSASTKGPSVFPLAPCSRSTSESTAALGCLVKDYFPEPVTVSWNSGALTSGVHTFPAVLQSSGLYSLSSVVTVPSSSLGTKTYTCNVDHKPSNTKVDKRVESKYGPPCPPCPAPEFLGGPSVFLFPPKPKDTLMISRTPEVTCVVVDVSQEDPEVQFNWYVDGVEVHNAKTKPREEQFNSTYRVVSVLTVLHQDWLNGKEYKCKVSNKGLPSSIEKTISKAKGQPREPQVYTLPPSQEEMTKNQVSLTCLVKGFYPSDIAVEWESNGQPENNYKTTPPVLDSDGSFFLYSRLTVDKSRWQEGNVFSCSVMHEALHNHYTQKSLSLSLG

SEQ ID NO: 1701 - protein, 448 aa, synthetic construct; identical to SEQ ID NO: 477
  REGION 1..448: note = 846.1H12-hIgG4(S228P) HC AA Sequence w/o SS

SEQ ID NO: 1702 - protein, 448 aa, synthetic construct; identical to SEQ ID NO: 476
  REGION 1..448: note = 846.2H3-hIgG4(S228P)HC AA Sequence w/o SS

SEQ ID NO: 1703 - protein, 448 aa, synthetic construct; identical to SEQ ID NO: 476
  REGION 1..448: note = 846.1F5-hIgG4(S228P)HC AA Sequence w/o SS

SEQ ID NO: 1704 - protein, 448 aa, synthetic construct; identical to SEQ ID NO: 482
  REGION 1..448: note = 846T.16B5-hIgG4(S228P) HC AA Sequence w/o SS

SEQ ID NO: 1705 - protein, 441 aa, synthetic construct
  REGION 1..441: note = 20D11.2C6-hIgG4(S228P) HC AA Sequence w/o SS
EVQLQQSGPELVKPGASVKISCKASGYTFTDFYINWVKQSHGKSLEWIGDINPKNGGINYNPKFKIKATLTVDKSSSTSYMDLRGLTSEDSAVYYCTSGYGFPYWGQGTLVTVSAASTKGPSVFPLAPCSRSTSESTAALGCLVKDYFPEPVTVSWNSGALTSGVHTFPAVLQSSGLYSLSSVVTVPSSSLGTKTYTCNVDHKPSNTKVDKRVESKYGPPCPPCPAPEFLGGPSVFLFPPKPKDTLMISRTPEVTCVVVDVSQEDPEVQFNWYVDGVEVHNAKTKPREEQFNSTYRVVSVLTVLHQDWLNGKEYKCKVSNKGLPSSIEKTISKAKGQPREPQVYTLPPSQEEMTKNQVSLTCLVKGFYPSDIAVEWESNGQPENNYKTTPPVLDSDGSFFLYSRLTVDKSRWQEGNVFSCSVMHEALHNHYTQKSLSLSLG

SEQ ID NO: 1706 - protein, 442 aa, synthetic construct; identical to SEQ ID NO: 448
  REGION 1..442: note = 15G7.2A7-hIgG4(S228P) HC AA Sequence w/o SS

SEQ ID NO: 1707 - protein, 445 aa, synthetic construct; identical to SEQ ID NO: 486
  REGION 1..445: note = IMT001-4-HCLC (TB001) HC AA Sequence w/o SS

SEQ ID NO: 1708 - protein, 440 aa, synthetic construct; identical to SEQ ID NO: 480
  REGION 1..440: note = 846T.14A2-hIgG4(S338P) HC AA Sequence w/o SS

SEQ ID NO: 1709 - protein, 442 aa, synthetic construct; identical to SEQ ID NO: 1156
  REGION 1..442: note = 798-9.20H5.A3-mH1mL0-hIgG4(S228P) HC AA Sequence w/o SS

SEQ ID NO: 1710 - protein, 440 aa, synthetic construct; identical to SEQ ID NO: 1411
  REGION 1..440: note = F847C.21H6-hIgG4(S228P) HC AA Sequence w/o SS

SEQ ID NO: 1711 - protein, 443 aa, synthetic construct; identical to SEQ ID NO: 472
  REGION 1..443: note = 798-9.19D9.2E5-hIgG4(S228P)-mV2 HC AA Sequence w/o SS

SEQ ID NO: 1712 - DNA, 720 bp, synthetic construct
  misc_feature 1..720: note = 4A11-VH3-hIgG4(S228P)-VL1 (TB006) LC NT Sequence
  source 1..720: mol_type = other DNA
atggaaaccgacaccctgctgctctgggtgctgctgctctgggtgcccggctccaccggagatgtggtcatgactcaaagccccctgtccctgcccgtgacacttggacaacctgcaagtatttcttgccgatcttcccagagtttgtttcatagcgatgggaagacatacctcaactggcttcaacagagaccaggacaaagtccaagacgtttgatttatcttgtttctaaacgtgattccggtgttcctgacaggttcagcggctctggaagcggcactgattttactcttaaaatatcccgtgtagaggcagaggatgtgggtgtttactactgctggcagggtactcattttcctcttacattcgggggtggaacaaaagtagagattaagcggaccgtggccgcccccagcgtgttcatcttccctcccagcgacgagcagctgaagtctggcaccgccagcgtggtgtgcctgctgaacaacttctacccccgcgaggccaaggtgcagtggaaggtggacaacgccctgcagagcggcaacagccaggagagcgtgaccgagcaggactccaaggacagcacctacagcctgagcagcaccctgaccctgagcaaggccgactacgagaagcacaaggtgtacgcctgcgaggtgacccaccagggactgtctagccccgtgaccaagagcttcaaccggggcgagtgctaa

SEQ ID NO: 1713 - DNA, 720 bp, synthetic construct
  misc_feature 1..720: note = 13H12-VH3-hIgG4(S228P)-VL1 LC NT Sequence
  source 1..720: mol_type = other DNA
atggaaaccgacaccctgctgctctgggtgctgctgctctgggtgcccggctccaccggagatatagtgatgacccaaacacctttgtccctgtcagtcaccccaggccaacccgcatctatctcatgcaaatcctcaaaaagtcttttgcactctgacgggataacatatctctactggtatcttcaaaaacctggtcagtccccccagctcttgatctatagaatgagtaaccttgcctctggtgtccccgaccggtttagtggaagcgggtctgggaccgacttcaccctcaagattagtcgcgtcgaagccgaagatgtgggagtgtattactgtgcccagatgctcgaatttcccctgacatttggtcaaggaactaaattggagattaagcggaccgtggccgcccccagcgtgttcatcttccctcccagcgacgagcagctgaagtctggcaccgccagcgtggtgtgcctgctgaacaacttctacccccgcgaggccaaggtgcagtggaaggtggacaacgccctgcagagcggcaacagccaggagagcgtgaccgagcaggactccaaggacagcacctacagcctgagcagcaccctgaccctgagcaaggccgactacgagaagcacaaggtgtacgcctgcgaggtgacccaccagggactgtctagccccgtgaccaagagcttcaaccggggcgagtgctaa

SEQ ID NO: 1714 - DNA, 705 bp, synthetic construct
  misc_feature 1..705: note = 19B5-H1L1-hIgG4(S228P) LC NT Sequence
  source 1..705: mol_type = other DNA
atggaaaccgacaccctgctgctctgggtgctgctgctctgggtgcccggctccaccggagatattcaaatgactcaatctcctagctctctgtccgctagtgtcggtgatagagtcacaattacatgcagagcttctcaagggatcaataattatcttaattggtatcagcagaaacctgggaaagtgccaaagctgctgatctattacgccagtaccctccactcaggtgttccctcacgtttttccggctccggcagcggtacagattatacactcactatcagttccttgcaacccgaagacgtagcaacctattattgccagcagtattcacaagtaccttatacattcgggcaggggacaaaacttgaaataaagaggaccgtggccgcccccagcgtgttcatcttccctcccagcgacgagcagctgaagtctggcaccgccagcgtggtgtgcctgctgaacaacttctacccccgcgaggccaaggtgcagtggaaggtggacaacgccctgcagagcggcaacagccaggagagcgtgaccgagcaggactccaaggacagcacctacagcctgagcagcaccctgaccctgagcaaggccgactacgagaagcacaaggtgtacgcctgcgaggtgacccaccagggactgtctagccccgtgaccaagagcttcaaccggggcgagtgctaa

SEQ ID NO: 1715 - DNA, 720 bp, synthetic construct
  misc_feature 1..720: note = 14H10.2C9-hIgG4(S228P) LC NT Sequence
  source 1..720: mol_type = other DNA
atggaaaccgacaccctgctgctctgggtgctgctgctctgggtgcccggctccaccggagatgttgtgatgacccagactccactcactttgtcggttaccattggacaaccagcctccatctcttgcaagtcaagtcagagcctcttcgatagtgatggaaagacatatttgaattggttgttacagaggccaggccagtctccaaagcgcctaatctatctggtgtctaaactggactctggagtccctgacaggttcactggcagtggatcagggacagatttcacactgaaaatcagcagagtggaggctgaggatttgggagtttattattgctggcaaggtacacattttcctctcacgttcggtgctgggaccaagctggaaatgaaacggaccgtggccgcccccagcgtgttcatcttccctcccagcgacgagcagctgaagtctggcaccgccagcgtggtgtgcctgctgaacaacttctacccccgcgaggccaaggtgcagtggaaggtggacaacgccctgcagagcggcaacagccaggagagcgtgaccgagcaggactccaaggacagcacctacagcctgagcagcaccctgaccctgagcaaggccgactacgagaagcacaaggtgtacgcctgcgaggtgacccaccagggactgtctagccccgtgaccaagagcttcaaccggggcgagtgctaa

SEQ ID NO: 1716 - DNA, 705 bp, synthetic construct
  misc_feature 1..705: note = 15G7.2A7-hIgG4(S228P) LC NT Sequence
  source 1..705: mol_type = other DNA
atggaaaccgacaccctgctgctctgggtgctgctgctctgggtgcccggctccaccggagacatccagatgaaccagtctccatccagtctgtctgcatccctcggagacacaatttccatcacttgccgtgccagtcagaacattaatatttggttaagctggtaccagcagaaaccaggaaatattcctcaactattgatctataaggcttccaacttgcacacaggcgtcccctcaaggtttagtggcagtggatctggaacagatttcacattaaccatcagcagtctgcagcctgaagacattgccacttactactgtctacagggtcaaagttatcctctcacgttcggtgctgggaccaagctggtgatgaaacggaccgtggccgcccccagcgtgttcatcttccctcccagcgacgagcagctgaagtctggcaccgccagcgtggtgtgcctgctgaacaacttctacccccgcgaggccaaggtgcagtggaaggtggacaacgccctgcagagcggcaacagccaggagagcgtgaccgagcaggactccaaggacagcacctacagcctgagcagcaccctgaccctgagcaaggccgactacgagaagcacaaggtgtacgcctgcgaggtgacccaccagggactgtctagccccgtgaccaagagcttcaaccggggcgagtgctaa

SEQ ID NO: 1717 - DNA, 705 bp, synthetic construct
  misc_feature 1..705: note = MOPC21-hIgG4(S228P) LC NT Sequence
  source 1..705: mol_type = other DNA
atggaaaccgacaccctgctgctctgggtgctgctgctctgggtgcccggctccaccggaaacatcgtgatgacacagtcccccaaatccatgtccatgtccgtgggcgagagggtgacactgacatgcaaagcctccgagaacgtggtgacatacgtgtcctggtaccagcagaaacccgagcagtcccccaaactgctgatctacggcgcctccaacaggtacacaggcgtgcccgacaggttcacaggctccggctccgccacagacttcacactgacaatctcctccgtgcaggccgaggacctggccgactaccactgcggccagggctactcctacccctacacattcggcggcggcacaaaactggagatcaaacggaccgtggccgcccccagcgtgttcatcttccctcccagcgacgagcagctgaagtctggcaccgccagcgtggtgtgcctgctgaacaacttctacccccgcgaggccaaggtgcagtggaaggtggacaacgccctgcagagcggcaacagccaggagagcgtgaccgagcaggactccaaggacagcacctacagcctgagcagcaccctgaccctgagcaaggccgactacgagaagcacaaggtgtacgcctgcgaggtgacccaccagggactgtctagccccgtgaccaagagcttcaaccggggcgagtgctaa

SEQ ID NO: 1718 - DNA, 720 bp, synthetic construct
  misc_feature 1..720: note = 846.1H12-hIgG4(S228P) LC NT Sequence
  source 1..720: mol_type = other DNA
atggaaaccgacaccctgctgctctgggtgctgctgctctgggtgcccggctccaccggaaacattatgatgacacagtcgccatcatctctggctgtgtctgcaggacaaaaggtcactatgagctgtaagtccagtcaaagtgttttatacagttcaagtcagaagaactacttggcctggtaccagcagaaaccagggcagtctcctaaacttctgatctactgggcatccactagggaatctggtgtccctgatcgcttctcaggcagtggatctgggacagattttactcttaccatcagcagtgtacaacctgaagacctggcagtttattactgtcatcaatacctctcctcgctcacgttcggtgctgggaccaagctggagctgaaacggaccgtggccgcccccagcgtgttcatcttccctcccagcgacgagcagctgaagtctggcaccgccagcgtggtgtgcctgctgaacaacttctacccccgcgaggccaaggtgcagtggaaggtggacaacgccctgcagagcggcaacagccaggagagcgtgaccgagcaggactccaaggacagcacctacagcctgagcagcaccctgaccctgagcaaggccgactacgagaagcacaaggtgtacgcctgcgaggtgacccaccagggactgtctagccccgtgaccaagagcttcaaccggggcgagtgctaa

SEQ ID NO: 1719 - DNA, 720 bp, synthetic construct
  misc_feature 1..720: note = 846.2H3-hIgG4(S228P)LC NT Sequence
  source 1..720: mol_type = other DNA
atggaaaccgacaccctgctgctctgggtgctgctgctctgggtgcccggctccaccggaaacattatgatgacacagtcgccatcatctctggctgtgtctgcaggagaaaaggtcactatgagctgtaagtccagtcaaagtgttttatacagttcaaatcagaagaactacttggcctggtaccagcagaaaccagggcagtctcctaaactgctgatctactgggcatccactagggaatctggtgtccctgatcgcttcacaggcagtggatctgggacagattttactcttaccatcagcagtgtacaacctgaagacctggcagtttattactgtcatcaatacctctcctcgctcacgttcggtgctgggaccaagctggagctgaaacggaccgtggccgcccccagcgtgttcatcttccctcccagcgacgagcagctgaagtctggcaccgccagcgtggtgtgcctgctgaacaacttctacccccgcgaggccaaggtgcagtggaaggtggacaacgccctgcagagcggcaacagccaggagagcgtgaccgagcaggactccaaggacagcacctacagcctgagcagcaccctgaccctgagcaaggccgactacgagaagcacaaggtgtacgcctgcgaggtgacccaccagggactgtctagccccgtgaccaagagcttcaaccggggcgagtgctaa

SEQ ID NO: 1720 - DNA, 720 bp, synthetic construct; identical to SEQ ID NO: 1719
  misc_feature 1..720: note = 846.1F5-hIgG4(S228P)LC NT Sequence
  source 1..720: mol_type = other DNA

SEQ ID NO: 1721 - DNA, 720 bp, synthetic construct
  misc_feature 1..720: note = 846T.16B5-hIgG4(S228P) LC NT Sequence
  source 1..720: mol_type = other DNA
atggaaaccgacaccctgctgctctgggtgctgctgctctgggtgcccggctccaccggaaacattatgatgacacagtcgccatcatctctggctgtgtctgcaggagaaaaggtcactatgagctgtaagtccagtcaaagtgttttatacagttcaaatcagaagaactacttggcctggtaccagcagaaaccagggcagtctcctaaactactgatctactgggcatccactagggaatctggtgtccctgatcgcttcacaggcagtggatctgggacagattttactcttaccatcagcagtgtacaagctgaagacctggcagtttattactgtcatcaatacctctcctcgctcacgttcggtgctgggaccaagctggagctgaaacggaccgtggccgcccccagcgtgttcatcttccctcccagcgacgagcagctgaagtctggcaccgccagcgtggtgtgcctgctgaacaacttctacccccgcgaggccaaggtgcagtggaaggtggacaacgccctgcagagcggcaacagccaggagagcgtgaccgagcaggactccaaggacagcacctacagcctgagcagcaccctgaccctgagcaaggccgactacgagaagcacaaggtgtacgcctgcgaggtgacccaccagggactgtctagccccgtgaccaagagcttcaaccggggcgagtgctaa

SEQ ID NO: 1722 - DNA, 705 bp, synthetic construct
  misc_feature 1..705: note = 20D11.2C6-hIgG4(S228P) LC NT Sequence
  source 1..705: mol_type = other DNA
atggaaaccgacaccctgctgctctgggtgctgctgctctgggtgcccggctccaccggagacatccagatgaaccagtctccatccagtctgtctgcatccctcggagacacaattaccatcacttgccgtgccagtcagaacatttatatttggttaagttggtaccagcagaaaccaggaaatattcctaaactcttgatctataaggcttccaacttgcacacaggcgtcccatcaaggtttagtggcagtggatctggaacagatttcacattaaccatcagcactctgcagcctgaagacattgccacttacttctgtctccagggtcaaagttatcctctcacgttcggtgctgggaccaagctggagatgaaacggaccgtggccgcccccagcgtgttcatcttccctcccagcgacgagcagctgaagtctggcaccgccagcgtggtgtgcctgctgaacaacttctacccccgcgaggccaaggtgcagtggaaggtggacaacgccctgcagagcggcaacagccaggagagcgtgaccgagcaggactccaaggacagcacctacagcctgagcagcaccctgaccctgagcaaggccgactacgagaagcacaaggtgtacgcctgcgaggtgacccaccagggactgtctagccccgtgaccaagagcttcaaccggggcgagtgctaa

SEQ ID NO: 1723 - DNA, 720 bp, synthetic construct
  misc_feature 1..720: note = 15G7.2A7-hIgG4(S228P) LC NT Sequence
  source 1..720: mol_type = other DNA
atggaaaccgacaccctgctgctctgggtgctgctgctctgggtgcccggctccaccggagacatcgtgctgacccagtctccactgagcctgcctgttacacctggcgagccagcctccatctcctgcagatcctctaagtccctgctgtacaaggacggcaagacctacctgaactggttcctgcagaagcccggccagtctcctcagctcctgatctacctgatgagcacccatgcctctggcgtgcccgatagattttccggctctggctctggcaccgacttcaccctgaagatctccagagtggaagccgaggacgtgggcgtgtactactgtcagcagctggtggactaccctctgacctttggcggcggaacaaagctggaaatcaagcggaccgtggccgcccccagcgtgttcatcttccctcccagcgacgagcagctgaagtctggcaccgccagcgtggtgtgcctgctgaacaacttctacccccgcgaggccaaggtgcagtggaaggtggacaacgccctgcagagcggcaacagccaggagagcgtgaccgagcaggactccaaggacagcacctacagcctgagcagcaccctgaccctgagcaaggccgactacgagaagcacaaggtgtacgcctgcgaggtgacccaccagggactgtctagccccgtgaccaagagcttcaaccggggcgagtgctaa

SEQ ID NO: 1724 - DNA, 705 bp, synthetic construct
  misc_feature 1..705: note = IMT001-4-HCLC (TB001) LC NT Sequence
  source 1..705: mol_type = other DNA
atggaaaccgacaccctgctgctctgggtgctgctgctctgggtgcccggctccaccggagacatccaggtgattcagtctccatccagtctgtctgcatcccttggagacacaattaccatcacttgccatgccagtcagaacattaatgtttggttaagctggtaccagcagaaaccaggaaatattcctaaactattgatctataaggcttccaacttgcacacaggcgtcccatcaaggtttagtggcagtggatctggaacaggtttcacattaaccatcagcagcctgcagcctgaagacattgccacttactactgtcaacagggtcaaagttatccgtacacgttcggaggggggaccaagctggagctgaaacggaccgtggccgcccccagcgtgttcatcttccctcccagcgacgagcagctgaagtctggcaccgccagcgtggtgtgcctgctgaacaacttctacccccgcgaggccaaggtgcagtggaaggtggacaacgccctgcagagcggcaacagccaggagagcgtgaccgagcaggactccaaggacagcacctacagcctgagcagcaccctgaccctgagcaaggccgactacgagaagcacaaggtgtacgcctgcgaggtgacccaccagggactgtctagccccgtgaccaagagcttcaaccggggcgagtgctaa

SEQ ID NO: 1725 - DNA, 711 bp, synthetic construct
  misc_feature 1..711: note = 846T.14A2-hIgG4(S338P) LC NT Sequence
  source 1..711: mol_type = other DNA
atggaaaccgacaccctgctgctctgggtgctgctgctctgggtgcccggctccaccggacaggctgttgtgactcaggaatctgcactcaccacatcacctggtgaaacagtcacactcacttgtcgctcaagtactggggctgttacaactagtaactatgccaactgggtccaagaaaaaccagatcatttattcactggtctaataggtggtatcaataaccgagttccaggtgttcctgccagattctcaggctccctgattggagacaaggcagccctcaccatcacaggggcacagactgaggatgaggcaatatatttctgtgctctatggtatagcaaccattgggtgttcggtggaggaaccaaactgactgtcctacggaccgtggccgcccccagcgtgttcatcttccctcccagcgacgagcagctgaagtctggcaccgccagcgtggtgtgcctgctgaacaacttctacccccgcgaggccaaggtgcagtggaaggtggacaacgccctgcagagcggcaacagccaggagagcgtgaccgagcaggactccaaggacagcacctacagcctgagcagcaccctgaccctgagcaaggccgactacgagaagcacaaggtgtacgcctgcgaggtgacccaccagggactgtctagccccgtgaccaagagcttcaaccggggcgagtgctaa

SEQ ID NO: 1726 - DNA, 705 bp, synthetic construct
  misc_feature 1..705: note = 798-9.20H5.A3-mH1mL0-hIgG4(S228P) LC NT Sequence
  source 1..705: mol_type = other DNA
atggaaaccgacaccctgctgctctgggtgctgctgctctgggtgcccggctccaccggagatatccagatgacacagactacatcctccctgtctgcctctctgggagacagagtcaccatcaattgcagtgcaagtcaggacattagcaattatttaaactggtatcagcagaaaccagatggaactgttaaactcctgatctattacacatcaagtttactctcaggagtcccatcaaggttcagtggcagtgggtctgggacagattattctctcaccatcagcaacctggaacctgaagatattgccacttacttttgtcagcaatatagtaagcttccctatacgttcggatcggggacccacctggaaataaaacggaccgtggccgcccccagcgtgttcatcttccctcccagcgacgagcagctgaagtctggcaccgccagcgtggtgtgcctgctgaacaacttctacccccgcgaggccaaggtgcagtggaaggtggacaacgccctgcagagcggcaacagccaggagagcgtgaccgagcaggactccaaggacagcacctacagcctgagcagcaccctgaccctgagcaaggccgactacgagaagcacaaggtgtacgcctgcgaggtgacccaccagggactgtctagccccgtgaccaagagcttcaaccggggcgagtgctaa

SEQ ID NO: 1727 - DNA, 720 bp, synthetic construct
  misc_feature 1..720: note = F847C.21H6-hIgG4(S228P) LC NT Sequence
  source 1..720: mol_type = other DNA
atggaaaccgacaccctgctgctctgggtgctgctgctctgggtgcccggctccaccggagatgtcgttatgactcagaccccactcacgctctcagtgaccatcggacagcctgccagcatctcatgtaaaagtagtcgcagcctgttagattctgacggcaagacctatctgaactggctgctgcagcgtcctggccagagcccaaaaaggctgatctatctcgtctcaaagctggattcaggagtccccgatcggtttacgggtagcggatctggcaccgacttcacactgaagatttctcgggttgaagccgaagatttgggcgtctactattgctggcaaggaacacacttccctcagacctttggcggcggcacaaagctggaaattaataggaccgtggccgcccccagcgtgttcatcttccctcccagcgacgagcagctgaagtctggcaccgccagcgtggtgtgcctgctgaacaacttctacccccgcgaggccaaggtgcagtggaaggtggacaacgccctgcagagcggcaacagccaggagagcgtgaccgagcaggactccaaggacagcacctacagcctgagcagcaccctgaccctgagcaaggccgactacgagaagcacaaggtgtacgcctgcgaggtgacccaccagggactgtctagccccgtgaccaagagcttcaaccggggcgagtgctaa

SEQ ID NO: 1728 - DNA, 720 bp, synthetic construct
  misc_feature 1..720: note = 798-9.19D9.2E5-hIgG4(S228P)-mV2 LC NT Sequence
  source 1..720: mol_type = other DNA
atggaaaccgacaccctgctgctctgggtgctgctgctctgggtgcccggctccaccggagatgctttgatgacccaaactccactcactttgtcggttaccattggacaaccagcctccatctcttgtaagtcaagtcagagcctcttacatagtgatggaaagacatatttgaattggttgttacagaggccaggccagcctccaaagcgcctaatgtatctggtgtctacactggactctggagtccctgacaggttcactggcagtggatcagggacagatttcacactgaaaatcagcagagtggaggctgaggatttgggagtttattattgctggcaaggtacacattttcctctcacgttcggtgctgggaccaagctggagctgaaaaggaccgtggccgcccccagcgtgttcatcttccctcccagcgacgagcagctgaagtctggcaccgccagcgtggtgtgcctgctgaacaacttctacccccgcgaggccaaggtgcagtggaaggtggacaacgccctgcagagcggcaacagccaggagagcgtgaccgagcaggactccaaggacagcacctacagcctgagcagcaccctgaccctgagcaaggccgactacgagaagcacaaggtgtacgcctgcgaggtgacccaccagggactgtctagccccgtgaccaagagcttcaaccggggcgagtgctaa

SEQ ID NO: 1729 - protein, 239 aa, synthetic construct
  REGION 1..239: note = 4A11-VH3-hIgG4(S228P)-VL1 (TB006) LC AA Sequence w/SS
METDTLLLWVLLLWVPGSTGDVVMTQSPLSLPVTLGQPASISCRSSQSLFHSDGKTYLNWLQQRPGQSPRRLIYLVSKRDSGVPDRFSGSGSGTDFTLKISRVEAEDVGVYYCWQGTHFPLTFGGGTKVEIKRTVAAPSVFIFPPSDEQLKSGTASVVCLLNNFYPREAKVQWKVDNALQSGNSQESVTEQDSKDSTYSLSSTLTLSKADYEKHKVYACEVTHQGLSSPVTKSFNRGEC

SEQ ID NO: 1730 - protein, 239 aa, synthetic construct
  REGION 1..239: note = 13H12-VH3-hIgG4(S228P)-VL1 LC AA Sequence w/SS
METDTLLLWVLLLWVPGSTGDIVMTQTPLSLSVTPGQPASISCKSSKSLLHSDGITYLYWYLQKPGQSPQLLIYRMSNLASGVPDRFSGSGSGTDFTLKISRVEAEDVGVYYCAQMLEFPLTFGQGTKLEIKRTVAAPSVFIFPPSDEQLKSGTASVVCLLNNFYPREAKVQWKVDNALQSGNSQESVTEQDSKDSTYSLSSTLTLSKADYEKHKVYACEVTHQGLSSPVTKSFNRGEC

SEQ ID NO: 1731 - protein, 234 aa, synthetic construct
  REGION 1..234: note = 19B5-H1L1-hIgG4(S228P) LC AA Sequence w/SS
METDTLLLWVLLLWVPGSTGDIQMTQSPSSLSASVGDRVTITCRASQGINNYLNWYQQKPGKVPKLLIYYASTLHSGVPSRFSGSGSGTDYTLTISSLQPEDVATYYCQQYSQVPYTFGQGTKLEIKRTVAAPSVFIFPPSDEQLKSGTASVVCLLNNFYPREAKVQWKVDNALQSGNSQESVTEQDSKDSTYSLSSTLTLSKADYEKHKVYACEVTHQGLSSPVTKSFNRGEC

SEQ ID NO: 1732 - protein, 239 aa, synthetic construct
  REGION 1..239: note = 14H10.2C9-hIgG4(S228P) LC AA Sequence w/SS
METDTLLLWVLLLWVPGSTGDVVMTQTPLTLSVTIGQPASISCKSSQSLFDSDGKTYLNWLLQRPGQSPKRLIYLVSKLDSGVPDRFTGSGSGTDFTLKISRVEAEDLGVYYCWQGTHFPLTFGAGTKLEMKRTVAAPSVFIFPPSDEQLKSGTASVVCLLNNFYPREAKVQWKVDNALQSGNSQESVTEQDSKDSTYSLSSTLTLSKADYEKHKVYACEVTHQGLSSPVTKSFNRGEC

SEQ ID NO: 1733 - protein, 234 aa, synthetic construct
  REGION 1..234: note = 15G7.2A7-hIgG4(S228P) LC AA Sequence w/SS
METDTLLLWVLLLWVPGSTGDIQMNQSPSSLSASLGDTISITCRASQNINIWLSWYQQKPGNIPQLLIYKASNLHTGVPSRFSGSGSGTDFTLTISSLQPEDIATYYCLQGQSYPLTFGAGTKLVMKRTVAAPSVFIFPPSDEQLKSGTASVVCLLNNFYPREAKVQWKVDNALQSGNSQESVTEQDSKDSTYSLSSTLTLSKADYEKHKVYACEVTHQGLSSPVTKSFNRGEC

SEQ ID NO: 1734 - protein, 234 aa, synthetic construct
  REGION 1..234: note = MOPC21-hIgG4(S228P) LC AA Sequence w/SS
METDTLLLWVLLLWVPGSTGNIVMTQSPKSMSMSVGERVTLTCKASENVVTYVSWYQQKPEQSPKLLIYGASNRYTGVPDRFTGSGSATDFTLTISSVQAEDLADYHCGQGYSYPYTFGGGTKLEIKRTVAAPSVFIFPPSDEQLKSGTASVVCLLNNFYPREAKVQWKVDNALQSGNSQESVTEQDSKDSTYSLSSTLTLSKADYEKHKVYACEVTHQGLSSPVTKSFNRGEC

SEQ ID NO: 1735 - protein, 239 aa, synthetic construct
  REGION 1..239: note = 846.1H12-hIgG4(S228P) LC AA Sequence w/SS
METDTLLLWVLLLWVPGSTGNIMMTQSPSSLAVSAGQKVTMSCKSSQSVLYSSSQKNYLAWYQQKPGQSPKLLIYWASTRESGVPDRFSGSGSGTDFTLTISSVQPEDLAVYYCHQYLSSLTFGAGTKLELKRTVAAPSVFIFPPSDEQLKSGTASVVCLLNNFYPREAKVQWKVDNALQSGNSQESVTEQDSKDSTYSLSSTLTLSKADYEKHKVYACEVTHQGLSSPVTKSFNRGEC

SEQ ID NO: 1736 - protein, 239 aa, synthetic construct
  REGION 1..239: note = 846.2H3-hIgG4(S228P)LC AA Sequence w/SS
METDTLLLWVLLLWVPGSTGNIMMTQSPSSLAVSAGEKVTMSCKSSQSVLYSSNQKNYLAWYQQKPGQSPKLLIYWASTRESGVPDRFTGSGSGTDFTLTISSVQPEDLAVYYCHQYLSSLTFGAGTKLELKRTVAAPSVFIFPPSDEQLKSGTASVVCLLNNFYPREAKVQWKVDNALQSGNSQESVTEQDSKDSTYSLSSTLTLSKADYEKHKVYACEVTHQGLSSPVTKSFNRGEC

SEQ ID NO: 1737 - protein, 239 aa, synthetic construct; identical to SEQ ID NO: 1736
  REGION 1..239: note = 846.1F5-hIgG4(S228P)LC AA Sequence w/SS

SEQ ID NO: 1738 - protein, 239 aa, synthetic construct
  REGION 1..239: note = 846T.16B5-hIgG4(S228P) LC AA Sequence w/SS
METDTLLLWVLLLWVPGSTGNIMMTQSPSSLAVSAGEKVTMSCKSSQSVLYSSNQKNYLAWYQQKPGQSPKLLIYWASTRESGVPDRFTGSGSGTDFTLTISSVQAEDLAVYYCHQYLSSLTFGAGTKLELKRTVAAPSVFIFPPSDEQLKSGTASVVCLLNNFYPREAKVQWKVDNALQSGNSQESVTEQDSKDSTYSLSSTLTLSKADYEKHKVYACEVTHQGLSSPVTKSFNRGEC

SEQ ID NO: 1739 - protein, 234 aa, synthetic construct
  REGION 1..234: note = 20D11.2C6-hIgG4(S228P) LC AA Sequence w/SS
METDTLLLWVLLLWVPGSTGDIQMNQSPSSLSASLGDTITITCRASQNIYIWLSWYQQKPGNIPKLLIYKASNLHTGVPSRFSGSGSGTDFTLTISTLQPEDIATYFCLQGQSYPLTFGAGTKLEMKRTVAAPSVFIFPPSDEQLKSGTASVVCLLNNFYPREAKVQWKVDNALQSGNSQESVTEQDSKDSTYSLSSTLTLSKADYEKHKVYACEVTHQGLSSPVTKSFNRGEC

SEQ ID NO: 1740 - protein, 239 aa, synthetic construct
  REGION 1..239: note = 15G7.2A7-hIgG4(S228P) LC AA Sequence w/SS
METDTLLLWVLLLWVPGSTGDIVLTQSPLSLPVTPGEPASISCRSSKSLLYKDGKTYLNWFLQKPGQSPQLLIYLMSTHASGVPDRFSGSGSGTDFTLKISRVEAEDVGVYYCQQLVDYPLTFGGGTKLEIKRTVAAPSVFIFPPSDEQLKSGTASVVCLLNNFYPREAKVQWKVDNALQSGNSQESVTEQDSKDSTYSLSSTLTLSKADYEKHKVYACEVTHQGLSSPVTKSFNRGEC

SEQ ID NO: 1741 - protein, 234 aa, synthetic construct
  REGION 1..234: note = IMT001-4-HCLC (TB001) LC AA Sequence w/SS
METDTLLLWVLLLWVPGSTGDIQVIQSPSSLSASLGDTITITCHASQNINVWLSWYQQKPGNIPKLLIYKASNLHTGVPSRFSGSGSGTGFTLTISSLQPEDIATYYCQQGQSYPYTFGGGTKLELKRTVAAPSVFIFPPSDEQLKSGTASVVCLLNNFYPREAKVQWKVDNALQSGNSQESVTEQDSKDSTYSLSSTLTLSKADYEKHKVYACEVTHQGLSSPVTKSFNRGEC

SEQ ID NO: 1742 - protein, 236 aa, synthetic construct
  REGION 1..236: note = 846T.14A2-hIgG4(S338P) LC AA Sequence w/SS
METDTLLLWVLLLWVPGSTGQAVVTQESALTTSPGETVTLTCRSSTGAVTTSNYANWVQEKPDHLFTGLIGGINNRVPGVPARFSGSLIGDKAALTITGAQTEDEAIYFCALWYSNHWVFGGGTKLTVLRTVAAPSVFIFPPSDEQLKSGTASVVCLLNNFYPREAKVQWKVDNALQSGNSQESVTEQDSKDSTYSLSSTLTLSKADYEKHKVYACEVTHQGLSSPVTKSFNRGEC

SEQ ID NO: 1743 - protein, 234 aa, synthetic construct
  REGION 1..234: note = 798-9.20H5.A3-mH1mL0-hIgG4(S228P) LC AA Sequence w/SS
METDTLLLWVLLLWVPGSTGDIQMTQTTSSLSASLGDRVTINCSASQDISNYLNWYQQKPDGTVKLLIYYTSSLLSGVPSRFSGSGSGTDYSLTISNLEPEDIATYFCQQYSKLPYTFGSGTHLEIKRTVAAPSVFIFPPSDEQLKSGTASVVCLLNNFYPREAKVQWKVDNALQSGNSQESVTEQDSKDSTYSLSSTLTLSKADYEKHKVYACEVTHQGLSSPVTKSFNRGEC

SEQ ID NO: 1744 - protein, 239 aa, synthetic construct
  REGION 1..239: note = F847C.21H6-hIgG4(S228P) LC AA Sequence w/SS
METDTLLLWVLLLWVPGSTGDVVMTQTPLTLSVTIGQPASISCKSSRSLLDSDGKTYLNWLLQRPGQSPKRLIYLVSKLDSGVPDRFTGSGSGTDFTLKISRVEAEDLGVYYCWQGTHFPQTFGGGTKLEINRTVAAPSVFIFPPSDEQLKSGTASVVCLLNNFYPREAKVQWKVDNALQSGNSQESVTEQDSKDSTYSLSSTLTLSKADYEKHKVYACEVTHQGLSSPVTKSFNRGEC

SEQ ID NO: 1745 - protein, 239 aa, synthetic construct
  REGION 1..239: note = 798-9.19D9.2E5-hIgG4(S228P)-mV2 LC AA Sequence w/SS
METDTLLLWVLLLWVPGSTGDALMTQTPLTLSVTIGQPASISCKSSQSLLHSDGKTYLNWLLQRPGQPPKRLMYLVSTLDSGVPDRFTGSGSGTDFTLKISRVEAEDLGVYYCWQGTHFPLTFGAGTKLELKRTVAAPSVFIFPPSDEQLKSGTASVVCLLNNFYPREAKVQWKVDNALQSGNSQESVTEQDSKDSTYSLSSTLTLSKADYEKHKVYACEVTHQGLSSPVTKSFNRGEC

SEQ ID NO: 1746 - protein, 219 aa, synthetic construct
  REGION 1..219: note = 4A11-VH3-hIgG4(S228P)-VL1 (TB006) LC AA Sequence w/o SS
DVVMTQSPLSLPVTLGQPASISCRSSQSLFHSDGKTYLNWLQQRPGQSPRRLIYLVSKRDSGVPDRFSGSGSGTDFTLKISRVEAEDVGVYYCWQGTHFPLTFGGGTKVEIKRTVAAPSVFIFPPSDEQLKSGTASVVCLLNNFYPREAKVQWKVDNALQSGNSQESVTEQDSKDSTYSLSSTLTLSKADYEKHKVYACEVTHQGLSSPVTKSFNRGEC

SEQ ID NO: 1747 - protein, 219 aa, synthetic construct; identical to SEQ ID NO: 496
  REGION 1..219: note = 13H12-VH3-hIgG4(S228P)-VL1 LC AA Sequence w/o SS

SEQ ID NO: 1748 - protein, 214 aa, synthetic construct
  REGION 1..214: note = 19B5-H1L1-hIgG4(S228P) LC AA Sequence w/o SS
DIQMTQSPSSLSASVGDRVTITCRASQGINNYLNWYQQKPGKVPKLLIYYASTLHSGVPSRFSGSGSGTDYTLTISSLQPEDVATYYCQQYSQVPYTFGQGTKLEIKRTVAAPSVFIFPPSDEQLKSGTASVVCLLNNFYPREAKVQWKVDNALQSGNSQESVTEQDSKDSTYSLSSTLTLSKADYEKHKVYACEVTHQGLSSPVTKSFNRGEC

SEQ ID NO: 1749 - protein, 219 aa, synthetic construct
  REGION 1..219: note = 14H10.2C9-hIgG4(S228P) LC AA Sequence w/o SS
DVVMTQTPLTLSVTIGQPASISCKSSQSLFDSDGKTYLNWLLQRPGQSPKRLIYLVSKLDSGVPDRFTGSGSGTDFTLKISRVEAEDLGVYYCWQGTHFPLTFGAGTKLEMKRTVAAPSVFIFPPSDEQLKSGTASVVCLLNNFYPREAKVQWKVDNALQSGNSQESVTEQDSKDSTYSLSSTLTLSKADYEKHKVYACEVTHQGLSSPVTKSFNRGEC

SEQ ID NO: 1750 - protein, 219 aa, synthetic construct; identical to SEQ ID NO: 1749
  REGION 1..219: note = 15G7.2A7-hIgG4(S228P) LC AA Sequence w/o SS

SEQ ID NO: 1751 - protein, 214 aa, synthetic construct
  REGION 1..214: note = MOPC21-hIgG4(S228P) LC AA Sequence w/o SS
NIVMTQSPKSMSMSVGERVTLTCKASENVVTYVSWYQQKPEQSPKLLIYGASNRYTGVPDRFTGSGSATDFTLTISSVQAEDLADYHCGQGYSYPYTFGGGTKLEIKRTVAAPSVFIFPPSDEQLKSGTASVVCLLNNFYPREAKVQWKVDNALQSGNSQESVTEQDSKDSTYSLSSTLTLSKADYEKHKVYACEVTHQGLSSPVTKSFNRGEC

SEQ ID NO: 1752 - protein, 219 aa, synthetic construct; identical to SEQ ID NO: 523
  REGION 1..219: note = 846.1H12-hIgG4(S228P) LC AA Sequence w/o SS

SEQ ID NO: 1753 - protein, 219 aa, synthetic construct; identical to SEQ ID NO: 522
  REGION 1..219: note = 846.2H3-hIgG4(S228P)LC AA Sequence w/o SS

SEQ ID NO: 1754 - protein, 219 aa, synthetic construct; identical to SEQ ID NO: 522
  REGION 1..219: note = 846.1F5-hIgG4(S228P)LC AA Sequence w/o SS

SEQ ID NO: 1755 - protein, 219 aa, synthetic construct; identical to SEQ ID NO: 527
  REGION 1..219: note = 846T.16B5-hIgG4(S228P) LC AA Sequence w/o SS

SEQ ID NO: 1756 - protein, 214 aa, synthetic construct
  REGION 1..214: note = 20D11.2C6-hIgG4(S228P) LC AA Sequence w/o SS
DIQMNQSPSSLSASLGDTITITCRASQNIYIWLSWYQQKPGNIPKLLIYKASNLHTGVPSRFSGSGSGTDFTLTISTLQPEDIATYFCLQGQSYPLTFGAGTKLEMKRTVAAPSVFIFPPSDEQLKSGTASVVCLLNNFYPREAKVQWKVDNALQSGNSQESVTEQDSKDSTYSLSSTLTLSKADYEKHKVYACEVTHQGLSSPVTKSFNRGEC

SEQ ID NO: 1757 - protein, 219 aa, synthetic construct; identical to SEQ ID NO: 495
  REGION 1..219: note = 15G7.2A7-hIgG4(S228P) LC AA Sequence w/o SS

SEQ ID NO: 1758 - protein, 214 aa, synthetic construct; identical to SEQ ID NO: 531
  REGION 1..214: note = IMT001-4-HCLC (TB001) LC AA Sequence w/o SS

SEQ ID NO: 1759 - protein, 216 aa, synthetic construct; identical to SEQ ID NO: 525
  REGION 1..216: note = 846T.14A2-hIgG4(S338P) LC AA Sequence w/o SS

SEQ ID NO: 1760 - protein, 214 aa, synthetic construct; identical to SEQ ID NO: 1196
  REGION 1..214: note = 798-9.20H5.A3-mH1mL0-hIgG4(S228P) LC AA Sequence w/o SS

SEQ ID NO: 1761 - protein, 219 aa, synthetic construct; identical to SEQ ID NO: 1412
  REGION 1..219: note = F847C.21H6-hIgG4(S228P) LC AA Sequence w/o SS

SEQ ID NO: 1762 - protein, 219 aa, synthetic construct
  REGION 1..219: note = 798-9.19D9.2E5-hIgG4(S228P)-mV2 LC AA Sequence w/o SS
DALMTQTPLTLSVTIGQPASISCKSSQSLLHSDGKTYLNWLLQRPGQPPKRLMYLVSTLDSGVPDRFTGSGSGTDFTLKISRVEAEDLGVYYCWQGTHFPLTFGAGTKLELKRTVAAPSVFIFPPSDEQLKSGTASVVCLLNNFYPREAKVQWKVDNALQSGNSQESVTEQDSKDSTYSLSSTLTLSKADYEKHKVYACEVTHQGLSSPVTKSFNRGEC

SEQ ID NO: 1763 - protein, 8 aa, synthetic construct
  REGION 1..8: note = 4A11-VH3-hIgG4(S228P)-VL1 (TB006) CDRH1 Sequence
GYTFTEYT

SEQ ID NO: 1764 - protein, 8 aa, synthetic construct
  REGION 1..8: note = 13H12-VH3-hIgG4(S228P)-VL1 CDRH1 Sequence
GYSFTNYY

SEQ ID NO: 1765 - protein, 8 aa, synthetic construct
  REGION 1..8: note = 19B5-H1L1-hIgG4(S228P) CDRH1 Sequence
GYTFTTYA

SEQ ID NO: 1766 - protein, 8 aa, synthetic construct
  REGION 1..8: note = 14H10.2C9-hIgG4(S228P) CDRH1 Sequence
GYTFTTYG

SEQ ID NO: 1767 - protein, 8 aa, synthetic construct
  REGION 1..8: note = 15G7.2A7-hIgG4(S228P) CDRH1 Sequence
GYTFTDYY

SEQ ID NO: 1768 - protein, 8 aa, synthetic construct
  REGION 1..8: note = MOPC21-hIgG4(S228P) CDRH1 Sequence
GFTFSSFG

SEQ ID NO: 1769 - protein, 8 aa, synthetic construct
  REGION 1..8: note = 846.1H12-hIgG4(S228P) CDRH1 Sequence
GYTFTNFG

SEQ ID NO: 1770 - protein, 8 aa, synthetic construct
  REGION 1..8: note = 846.2H3-hIgG4(S228P)CDRH1 Sequence
GYTFTNYG

SEQ ID NO: 1771 - protein, 8 aa, synthetic construct
  REGION 1..8: note = 846.1F5-hIgG4(S228P)CDRH1 Sequence
GYTFTNYG

SEQ ID NO: 1772 - protein, 8 aa, synthetic construct
  REGION 1..8: note = 846T.16B5-hIgG4(S228P) CDRH1 Sequence
GYTFTNYG

SEQ ID NO: 1773 - protein, 8 aa, synthetic construct
  REGION 1..8: note = 20D11.2C6-hIgG4(S228P) CDRH1 Sequence
GYTFTDFY

SEQ ID NO: 1774 - protein, 8 aa, synthetic construct
  REGION 1..8: note = 15G7.2A7-hIgG4(S228P) CDRH1 Sequence
GYTFTNYG

SEQ ID NO: 1775 - protein, 8 aa, synthetic construct
  REGION 1..8: note = IMT001-4-HCLC (TB001) CDRH1 Sequence
GYTFTNYG

SEQ ID NO: 1776 - protein, 8 aa, synthetic construct
  REGION 1..8: note = 846T.14A2-hIgG4(S338P) CDRH1 Sequence
GYTFTNYG

SEQ ID NO: 1777 - protein, 8 aa, synthetic construct
  REGION 1..8: note = 798-9.20H5.A3-mH1mL0-hIgG4(S228P) CDRH1 Sequence
GYAFTTYG

SEQ ID NO: 1778 - protein, 8 aa, synthetic construct
  REGION 1..8: note = F847C.21H6-hIgG4(S228P) CDRH1 Sequence
GYTFTIFG

SEQ ID NO: 1779 - protein, 8 aa, synthetic construct
  REGION 1..8: note = 798-9.19D9.2E5-hIgG4(S228P)-mV2 CDRH1 Sequence
GYTFTTYG

SEQ ID NO: 1780 - protein, 8 aa, synthetic construct
  REGION 1..8: note = 4A11-VH3-hIgG4(S228P)-VL1 (TB006) CDRH2 Sequence
FYPGSDNI

SEQ ID NO: 1781 - protein, 8 aa, synthetic construct
  REGION 1..8: note = 13H12-VH3-hIgG4(S228P)-VL1 CDRH2 Sequence
IYPGSGNT

SEQ ID NO: 1782 - protein, 8 aa, synthetic construct
  REGION 1..8: note = 19B5-H1L1-hIgG4(S228P) CDRH2 Sequence
INTYSGVP

SEQ ID NO: 1783 - protein, 8 aa, synthetic construct
  REGION 1..8: note = 14H10.2C9-hIgG4(S228P) CDRH2 Sequence
INTYSGVP

SEQ ID NO: 1784 - protein, 8 aa, synthetic construct
  REGION 1..8: note = 15G7.2A7-hIgG4(S228P) CDRH2 Sequence
INPNNGGT

SEQ ID NO: 1785 - protein, 8 aa, synthetic construct
  REGION 1..8: note = MOPC21-hIgG4(S228P) CDRH2 Sequence
ISSGSSTL

SEQ ID NO: 1786 - protein, 8 aa, synthetic construct
  REGION 1..8: note = 846.1H12-hIgG4(S228P) CDRH2 Sequence
INTYTGEP

SEQ ID NO: 1787 - protein, 8 aa, synthetic construct
  REGION 1..8: note = 846.2H3-hIgG4(S228P)CDRH2 Sequence
INTYTGEP

SEQ ID NO: 1788 - protein, 8 aa, synthetic construct
  REGION 1..8: note = 846.1F5-hIgG4(S228P)CDRH2 Sequence
INTYTGEP

SEQ ID NO: 1789 - protein, 8 aa, synthetic construct
  REGION 1..8: note = 846T.16B5-hIgG4(S228P) CDRH2 Sequence
INTYTGEP

SEQ ID NO: 1790 - protein, 8 aa, synthetic construct
  REGION 1..8: note = 20D11.2C6-hIgG4(S228P) CDRH2 Sequence
INPKNGGI

SEQ ID NO: 1791 - protein, 8 aa, synthetic construct
  REGION 1..8: note = 15G7.2A7-hIgG4(S228P) CDRH2 Sequence
INTNTGEP

SEQ ID NO: 1792 - protein, 8 aa, synthetic construct
  REGION 1..8: note = IMT001-4-HCLC (TB001) CDRH2 Sequence
INTYTGEP

SEQ ID NO: 1793 - protein, 8 aa, synthetic construct
  REGION 1..8: note = 846T.14A2-hIgG4(S338P) CDRH2 Sequence
INTYTGEP

SEQ ID NO: 1794 - protein, 8 aa, synthetic construct
  REGION 1..8: note = 798-9.20H5.A3-mH1mL0-hIgG4(S228P) CDRH2 Sequence
VNTYSGVP

SEQ ID NO: 1795 - protein, 8 aa, synthetic construct
  REGION 1..8: note = F847C.21H6-hIgG4(S228P) CDRH2 Sequence
VNTYTGEP

SEQ ID NO: 1796 - protein, 8 aa, synthetic construct
  REGION 1..8: note = 798-9.19D9.2E5-hIgG4(S228P)-mV2 CDRH2 Sequence
INTYSGVP

SEQ ID NO: 1797 - protein, 16 aa, synthetic construct
  REGION 1..16: note = 4A11-VH3-hIgG4(S228P)-VL1 (TB006) CDRH3 Sequence
ARHEEGVITTVSYFDY

SEQ ID NO: 1798 - protein, 9 aa, synthetic construct
  REGION 1..9: note = 13H12-VH3-hIgG4(S228P)-VL1 CDRH3 Sequence
STAPGGFDV

SEQ ID NO: 1799 - protein, 9 aa, synthetic construct
  REGION 1..9: note = 19B5-H1L1-hIgG4(S228P) CDRH3 Sequence
ARGPYAMDY

SEQ ID NO: 1800 - protein, 10 aa, synthetic construct
  REGION 1..10: note = 14H10.2C9-hIgG4(S228P) CDRH3 Sequence
STPYEYDGAY

SEQ ID NO: 1801 - protein, 8 aa, synthetic construct
  REGION 1..8: note = 15G7.2A7-hIgG4(S228P) CDRH3 Sequence
TSGYGFPY

SEQ ID NO: 1802 - protein, 13 aa, synthetic construct
  REGION 1..13: note = MOPC21-hIgG4(S228P) CDRH3 Sequence
ARWGNYPYYAMDY

SEQ ID NO: 1803 - protein, 15 aa, synthetic construct
  REGION 1..15: note = 846.1H12-hIgG4(S228P) CDRH3 Sequence
ARWGGYAGDYYAMDY

SEQ ID NO: 1804 - protein, 15 aa, synthetic construct
  REGION 1..15: note = 846.2H3-hIgG4(S228P)CDRH3 Sequence
ARWGGYDGDYYAMDY

SEQ ID NO: 1805 - protein, 15 aa, synthetic construct
  REGION 1..15: note = 846.1F5-hIgG4(S228P)CDRH3 Sequence
ARWGGYDGDYYAMDY

SEQ ID NO: 1806 - protein, 15 aa, synthetic construct
  REGION 1..15: note = 846T.16B5-hIgG4(S228P) CDRH3 Sequence
ARWGGYDGDYYAMDY

SEQ ID NO: 1807 - protein, 8 aa, synthetic construct
  REGION 1..8: note = 20D11.2C6-hIgG4(S228P) CDRH3 Sequence
TSGYGFPY

SEQ ID NO: 1808 - protein, 9 aa, synthetic construct
  REGION 1..9: note = 15G7.2A7-hIgG4(S228P) CDRH3 Sequence
APYDNFFAY

SEQ ID NO: 1809 - protein, 12 aa, synthetic construct
  REGION 1..12: note = IMT001-4-HCLC (TB001) CDRH3 Sequence
AKFGNYVGAMDY

SEQ ID NO: 1810 - protein, 7 aa, synthetic construct
  REGION 1..7: note = 846T.14A2-hIgG4(S338P) CDRH3 Sequence
VRYTMDY

SEQ ID NO: 1811 - protein, 9 aa, synthetic construct
  REGION 1..9: note = 798-9.20H5.A3-mH1mL0-hIgG4(S228P) CDRH3 Sequence
ARGPYAMDY

SEQ ID NO: 1812 - protein, 7 aa, synthetic construct
  REGION 1..7: note = F847C.21H6-hIgG4(S228P) CDRH3 Sequence
ARGWFAY

SEQ ID NO: 1813 - protein, 10 aa, synthetic construct
  REGION 1..10: note = 798-9.19D9.2E5-hIgG4(S228P)-mV2 CDRH3 Sequence
ATPYEYDGAY

SEQ ID NO: 1814 - protein, 11 aa, synthetic construct
  REGION 1..11: note = 4A11-VH3-hIgG4(S228P)-VL1 (TB006) CDRL1 Sequence
QSLFHSDGKTY

SEQ ID NO: 1815 - protein, 11 aa, synthetic construct
  REGION 1..11: note = 13H12-VH3-hIgG4(S228P)-VL1 CDRL1 Sequence
KSLLHSDGITY

SEQ ID NO: 1816 - protein, 6 aa, synthetic construct
  REGION 1..6: note = 19B5-H1L1-hIgG4(S228P) CDRL1 Sequence
QGINNY

SEQ ID NO: 1817 - protein, 11 aa, synthetic construct
  REGION 1..11: note = 14H10.2C9-hIgG4(S228P) CDRL1 Sequence
QSLFDSDGKTY

SEQ ID NO: 1818 - protein, 6 aa, synthetic construct
  REGION 1..6: note = 15G7.2A7-hIgG4(S228P) CDRL1 Sequence
QNINIW

SEQ ID NO: 1819 - protein, 6 aa, synthetic construct
  REGION 1..6: note = MOPC21-hIgG4(S228P) CDRL1 Sequence
ENVVTY

SEQ ID NO: 1820 - protein, 12 aa, synthetic construct
  REGION 1..12: note = 846.1H12-hIgG4(S228P) CDRL1 Sequence
QSVLYSSSQKNY

SEQ ID NO: 1821 - protein, 12 aa, synthetic construct
  REGION 1..12: note = 846.2H3-hIgG4(S228P)CDRL1 Sequence
QSVLYSSNQKNY

SEQ ID NO: 1822 - protein, 12 aa, synthetic construct
  REGION 1..12: note = 846.1F5-hIgG4(S228P)CDRL1 Sequence
QSVLYSSNQKNY

SEQ ID NO: 1823 - protein, 12 aa, synthetic construct
  REGION 1..12: note = 846T.16B5-hIgG4(S228P) CDRL1 Sequence
QSVLYSSNQKNY

SEQ ID NO: 1824 - protein, 6 aa, synthetic construct
  REGION 1..6: note = 20D11.2C6-hIgG4(S228P) CDRL1 Sequence
QNIYIW

SEQ ID NO: 1825 - protein, 11 aa, synthetic construct
  REGION 1..11: note = 15G7.2A7-hIgG4(S228P) CDRL1 Sequence
KSLLYKDGKTY

SEQ ID NO: 1826 - protein, 6 aa, synthetic construct
  REGION 1..6: note = IMT001-4-HCLC (TB001) CDRL1 Sequence
QNINVW

SEQ ID NO: 1827 - protein, 9 aa, synthetic construct
  REGION 1..9: note = 846T.14A2-hIgG4(S338P) CDRL1 Sequence
TGAVTTSNY

SEQ ID NO: 1828 - protein, 6 aa, synthetic construct
  REGION 1..6: note = 798-9.20H5.A3-mH1mL0-hIgG4(S228P) CDRL1 Sequence
QDISNY

SEQ ID NO: 1829 - protein, 11 aa, synthetic construct
  REGION 1..11: note = F847C.21H6-hIgG4(S228P) CDRL1 Sequence
RSLLDSDGKTY

SEQ ID NO: 1830 - protein, 11 aa, synthetic construct
  REGION 1..11: note = 798-9.19D9.2E5-hIgG4(S228P)-mV2 CDRL1 Sequence
QSLLHSDGKTY

SEQ ID NO: 1831-1847 - skipped (17 entries)

SEQ ID NO: 1848 - protein, 9 aa, synthetic construct
  REGION 1..9: note = 4A11-VH3-hIgG4(S228P)-VL1 (TB006) CDRL3 Sequence
WQGTHFPLT

SEQ ID NO: 1849 - protein, 9 aa, synthetic construct
  REGION 1..9: note = 13H12-VH3-hIgG4(S228P)-VL1 CDRL3 Sequence
AQMLEFPLT

SEQ ID NO: 1850 - protein, 9 aa, synthetic construct
  REGION 1..9: note = 19B5-H1L1-hIgG4(S228P) CDRL3 Sequence
QQYSQVPYT

SEQ ID NO: 1851 - protein, 9 aa, synthetic construct
  REGION 1..9: note = 14H10.2C9-hIgG4(S228P) CDRL3 Sequence
WQGTHFPLT

SEQ ID NO: 1852 - protein, 9 aa, synthetic construct
  REGION 1..9: note = 15G7.2A7-hIgG4(S228P) CDRL3 Sequence
LQGQSYPLT

SEQ ID NO: 1853 - protein, 9 aa, synthetic construct
  REGION 1..9: note = MOPC21-hIgG4(S228P) CDRL3 Sequence
GQGYSYPYT

SEQ ID NO: 1854 - protein, 8 aa, synthetic construct
  REGION 1..8: note = 846.1H12-hIgG4(S228P) CDRL3 Sequence
HQYLSSLT

SEQ ID NO: 1855 - protein, 8 aa, synthetic construct
  REGION 1..8: note = 846.2H3-hIgG4(S228P)CDRL3 Sequence
HQYLSSLT

SEQ ID NO: 1856 - protein, 8 aa, synthetic construct
  REGION 1..8: note = 846.1F5-hIgG4(S228P) CDRL3 Sequence
HQYLSSLT

SEQ ID NO: 1857 - protein, 8 aa, synthetic construct
  REGION 1..8: note = 846T.16B5-hIgG4(S228P) CDRL3 Sequence
HQYLSSLT

SEQ ID NO: 1858 - protein, 9 aa, synthetic construct
  REGION 1..9: note = 20D11.2C6-hIgG4(S228P) CDRL3 Sequence
LQGQSYPLT

SEQ ID NO: 1859 - protein, 9 aa, synthetic construct
  REGION 1..9: note = 15G7.2A7-hIgG4(S228P) CDRL3 Sequence
QQLVDYPLT

SEQ ID NO: 1860 - protein, 9 aa, synthetic construct
  REGION 1..9: note = IMT001-4-HCLC (TB001) CDRL3 Sequence
QQGQSYPYT

SEQ ID NO: 1861 - protein, 9 aa, synthetic construct
  REGION 1..9: note = 846T.14A2-hIgG4(S338P) CDRL3 Sequence
ALWYSNHWV

SEQ ID NO: 1862 - protein, 9 aa, synthetic construct
  REGION 1..9: note = 798-9.20H5.A3-mH1mL0-hIgG4(S228P) CDRL3 Sequence
QQYSKLPYT

SEQ ID NO: 1863 - protein, 9 aa, synthetic construct
  REGION 1..9: note = F847C.21H6-hIgG4(S228P) CDRL3 Sequence
WQGTHFPQT

SEQ ID NO: 1864 - protein, 9 aa, synthetic construct
  REGION 1..9: note = 798-9.19D9.2E5-hIgG4(S228P)-mV2 CDRL3 Sequence
WQGTHFPLT

SEQ ID NO: 1865 - protein, 123 aa, synthetic construct
  REGION 1..123: note = 4A11-VH3-hIgG4(S228P)-VL1 (TB006) VH Sequence
QVQLVQSGSELKKPGASVKVSCKASGYTFTEYTIHWVRQAPGQGLEWMGWFYPGSDNINYNEGFTGRFVLSADKSVSTAYLQICSLKAEDTAVYFCARHEEGVITTVSYFDYWGQGTLVTVSS

SEQ ID NO: 1866 - protein, 123 aa, synthetic construct; identical to SEQ ID NO: 1865
  REGION 1..123: note = 13H12-VH3-hIgG4(S228P)-VL1 VH Sequence

SEQ ID NO: 1867 - protein, 116 aa, synthetic construct
  REGION 1..116: note = 19B5-H1L1-hIgG4(S228P) VH Sequence
QVQLVQSGSELKKPGASVKVSCKASGYTFTTYAMSWVRQAPGQGLEWMGWINTYSGVPTYADDFTGRFVFSLETSVSTAYLQISSLKAEDTAVYFCARGPYAMDYWGQGTLVTVSS

SEQ ID NO: 1868 - protein, 117 aa, synthetic construct; identical to SEQ ID NO: 301
  REGION 1..117: note = 14H10.2C9-hIgG4(S228P) VH Sequence

SEQ ID NO: 1869 - protein, 115 aa, synthetic construct; identical to SEQ ID NO: 318
  REGION 1..115: note = 15G7.2A7-hIgG4(S228P) VH Sequence

SEQ ID NO: 1870 - protein, 120 aa, synthetic construct
  REGION 1..120: note = MOPC21-hIgG4(S228P) VH Sequence
DVQLVESGGGLVQPGGSRKLSCAASGFTFSSFGMHWVRQAPEKGLEWVAYISSGSSTLHYADTVKGRFTISRDNPKNTLFLQMTSLRSEDTGMYYCARWGNYPYYAMDYWGQGTSVTVSS

SEQ ID NO: 1871 - protein, 122 aa, synthetic construct; identical to SEQ ID NO: 324
  REGION 1..122: note = 846.1H12-hIgG4(S228P) VH Sequence

SEQ ID NO: 1872 - protein, 122 aa, synthetic construct; identical to SEQ ID NO: 323
  REGION 1..122: note = 846.2H3-hIgG4(S228P)VH Sequence

SEQ ID NO: 1873 - protein, 122 aa, synthetic construct; identical to SEQ ID NO: 323
  REGION 1..122: note = 846.1F5-hIgG4(S228P)VH Sequence

SEQ ID NO: 1874 - protein, 122 aa, synthetic construct; identical to SEQ ID NO: 328
  REGION 1..122: note = 846T.16B5-hIgG4(S228P) VH Sequence

SEQ ID NO: 1875 - protein, 115 aa, synthetic construct; identical to SEQ ID NO: 304
  REGION 1..115: note = 20D11.2C6-hIgG4(S228P) VH Sequence

SEQ ID NO: 1876 - protein, 116 aa, synthetic construct; identical to SEQ ID NO: 297
  REGION 1..116: note = 15G7.2A7-hIgG4(S228P) VH Sequence

SEQ ID NO: 1877 - skipped

SEQ ID NO: 1878 - protein, 114 aa, synthetic construct; identical to SEQ ID NO: 326
  REGION 1..114: note = 846T.14A2-hIgG4(S338P) VH Sequence

SEQ ID NO: 1879 - protein, 116 aa, synthetic construct; identical to SEQ ID NO: 1070
  REGION 1..116: note = 798-9.20H5.A3-mH1mL0-hIgG4(S228P) VH Sequence

SEQ ID NO: 1880 - protein, 116 aa, synthetic construct; identical to SEQ ID NO: 1070
  REGION 1..116: note = F847C.21H6-hIgG4(S228P) VH Sequence

SEQ ID NO: 1881 - protein, 117 aa, synthetic construct; identical to SEQ ID NO: 319
  REGION 1..117: note = 798-9.19D9.2E5-hIgG4(S228P)-mV2 VH Sequence

SEQ ID NO: 1882 - protein, 112 aa, synthetic construct
  REGION 1..112: note = 4A11-VH3-hIgG4(S228P)-VL1 (TB006) VL Sequence
DVVMTQSPLSLPVTLGQPASISCRSSQSLFHSDGKTYLNWLQQRPGQSPRRLIYLVSKRDSGVPDRFSGSGSGTDFTLKISRVEAEDVGVYYCWQGTHFPLTFGGGTKVEIK

SEQ ID NO: 1883 - protein, 112 aa, synthetic construct; identical to SEQ ID NO: 375
  REGION 1..112: note = 13H12-VH3-hIgG4(S228P)-VL1 VL Sequence

SEQ ID NO: 1884 - protein, 107 aa, synthetic construct
  REGION 1..107: note = 19B5-H1L1-hIgG4(S228P) VL Sequence
DIQMTQSPSSLSASVGDRVTITCRASQGINNYLNWYQQKPGKVPKLLIYYASTLHSGVPSRFSGSGSGTDYTLTISSLQPEDVATYYCQQYSQVPYTFGQGTKLEIK

SEQ ID NO: 1885 - protein, 112 aa, synthetic construct; identical to SEQ ID NO: 378
  REGION 1..112: note = 14H10.2C9-hIgG4(S228P) VL Sequence

SEQ ID NO: 1886 - protein, 107 aa, synthetic construct
  REGION 1..107: note = 15G7.2A7-hIgG4(S228P) VL Sequence
DIQMNQSPSSLSASLGDTISITCRASQNINIWLSWYQQKPGNIPQLLIYKASNLHTGVPSRFSGSGSGTDFTLTISSLQPEDIATYYCLQGQSYPLTFGAGTKLVMK

SEQ ID NO: 1887 - protein, 107 aa, synthetic construct
  REGION 1..107: note = MOPC21-hIgG4(S228P) VL Sequence
NIVMTQSPKSMSMSVGERVTLTCKASENVVTYVSWYQQKPEQSPKLLIYGASNRYTGVPDRFTGSGSATDFTLTISSVQAEDLADYHCGQGYSYPYTFGGGTKLEIK

SEQ ID NO: 1888 - protein, 132 aa, synthetic construct
  REGION 1..132: note = 846.1H12-hIgG4(S228P) VL Sequence
METDTLLLWVLLLWVPGSTGNIMMTQSPSSLAVSAGQKVTMSCKSSQSVLYSSSQKNYLAWYQQKPGQSPKLLIYWASTRESGVPDRFSGSGSGTDFTLTISSVQPEDLAVYYCHQYLSSLTFGAGTKLELK

SEQ ID NO: 1889 - protein, 112 aa, synthetic construct; identical to SEQ ID NO: 401
  REGION 1..112: note = 846.2H3-hIgG4(S228P)VL Sequence

SEQ ID NO: 1890 - protein, 112 aa, synthetic construct; identical to SEQ ID NO: 400
  REGION 1..112: note = 846.1F5-hIgG4(S228P) VL Sequence

SEQ ID NO: 1891 - protein, 112 aa, synthetic construct; identical to SEQ ID NO: 405
  REGION 1..112: note = 846T.16B5-hIgG4(S228P) VL Sequence

SEQ ID NO: 1892 - protein, 107 aa, synthetic construct; identical to SEQ ID NO: 381
  REGION 1..107: note = 20D11.2C6-hIgG4(S228P) VL Sequence

SEQ ID NO: 1893 - protein, 112 aa, synthetic construct; identical to SEQ ID NO: 374
  REGION 1..112: note = 15G7.2A7-hIgG4(S228P) VL Sequence

SEQ ID NO: 1894 - protein, 112 aa, synthetic construct; identical to SEQ ID NO: 374
  REGION 1..112: note = IMT001-4-HCLC (TB001) VL Sequence

SEQ ID NO: 1895 - protein, 109 aa, synthetic construct; identical to SEQ ID NO: 403
  REGION 1..109: note = 846T.14A2-hIgG4(S338P) VL Sequence

SEQ ID NO: 1896 - protein, 107 aa, synthetic construct; identical to SEQ ID NO: 382
  REGION 1..107: note = 798-9.20H5.A3-mH1mL0-hIgG4(S228P) VL Sequence

SEQ ID NO: 1897 - protein, 112 aa, synthetic construct; identical to SEQ ID NO: 440
  REGION 1..112: note = F847C.21H6-hIgG4(S228P) VL Sequence

SEQ ID NO: 1898 - protein, 112 aa, synthetic construct
  REGION 1..112: note = 798-9.19D9.2E5-hIgG4(S228P)-mV2 VL Sequence
DALMTQTPLTLSVTIGQPASISCKSSQSLLHSDGKTYLNWLLQRPGQPPKRLMYLVSTLDSGVPDRFTGSGSGTDFTLKISRVEAEDLGVYYCWQGTHFPLTFGAGTKLELK

SEQ ID NO: 1899 - protein, 1416 aa, synthetic construct
  REGION 1..1416: note = Synagis-hIgG4(S228P) HC nt sequence
ATGGACCCCAAGGGCAGCCTGAGCTGGAGAATCCTGCTGTTCCTGAGCCTGGCCTTCGAGCTGAGCTACGGCCAAGTCACATTGAGAGAGTCCGGCCCCGCCCTTGTTAAGCCAACACAAACCCTCACACTTACATGCACCTTCTCAGGTTTTTCACTTAGCACATCCGGCATGAGTGTAGGTTGGATTAGACAGCCCCCTGGGAAAGCACTTGAATGGCTCGCAGATATCTGGTGGGATGACAAGAAAGACTATAACCCCAGCCTTAAATCCAGGCTGACAATTTCCAAAGACACATCCAAAAATCAAGTCGTGCTTAAAGTCACAAATATGGACCCAGCAGATACTGCCACCTATTATTGCGCCCGATCTATGATTACAAACTGGTATTTTGATGTGTGGGGAGCTGGGACAACCGTAACTGTATCTTCTGCTAGCACCAAGGGCCCCAGCGTGTTTCCTCTCGCTCCCTGCAGCCGGAGCACATCCGAGAGCACCGCTGCTCTGGGCTGTCTCGTGAAGGACTACTTCCCTGAACCCGTCACCGTCAGCTGGAATAGCGGCGCCCTGACATCCGGCGTCCACACATTCCCCGCTGTCCTGCAGAGCAGCGGCCTGTACAGCCTGAGCTCCGTGGTCACCGTGCCTAGCAGCAGCCTGGGAACAAAGACCTACACCTGCAACGTGGACCATAAGCCCTCCAACACCAAGGTGGACAAGCGGGTGGAATCCAAGTATGGACCCCCCTGTCCTCCTTGCCCTGCTCCTGAATTTCTCGGAGGCCCCTCCGTCTTCCTGTTTCCCCCCAAGCCCAAGGACACCCTGATGATCTCCCGGACACCCGAAGTCACCTGCGTCGTGGTGGATGTCAGCCAGGAAGATCCCGAGGTGCAGTTCAACTGGTACGTGGACGGAGTGGAGGTGCATAACGCCAAAACCAAGCCCAGGGAAGAGCAGTTCAACAGCACCTATCGGGTCGTGTCCGTGCTCACCGTCCTGCATCAGGATTGGCTCAACGGCAAGGAGTACAAGTGCAAGGTGTCCAACAAGGGCCTGCCCTCCTCCATCGAGAAGACCATCTCCAAGGCTAAGGGCCAACCTCGGGAGCCCCAAGTGTATACCCTCCCTCCCAGCCAGGAGGAGATGACCAAGAATCAAGTGAGCCTGACCTGCCTCGTGAAGGGATTTTACCCCTCCGACATCGCTGTGGAATGGGAAAGCAATGGCCAACCTGAGAACAACTACAAGACCACACCCCCCGTGCTGGACTCCGATGGCTCCTTCTTCCTGTACAGCAGGCTGACCGTGGACAAATCCCGGTGGCAAGAGGGAAACGTGTTCAGCTGCTCCGTGATGCACGAGGCTCTCCACAACCACTACACCCAGAAGAGCCTCTCCCTGAGCCTCGGCTAGTAA

SEQ ID NO: 1900 - protein, 470 aa, synthetic construct
  REGION 1..470: note = Synagis-hIgG4(S228P) HC aa sequence w SS
MDPKGSLSWRILLFLSLAFELSYGQVTLRESGPALVKPTQTLTLTCTFSGFSLSTSGMSVGWIRQPPGKALEWLADIWWDDKKDYNPSLKSRLTISKDTSKNQVVLKVTNMDPADTATYYCARSMITNWYFDVWGAGTTVTVSSASTKGPSVFPLAPCSRSTSESTAALGCLVKDYFPEPVTVSWNSGALTSGVHTFPAVLQSSGLYSLSSVVTVPSSSLGTKTYTCNVDHKPSNTKVDKRVESKYGPPCPPCPAPEFLGGPSVFLFPPKPKDTLMISRTPEVTCVVVDVSQEDPEVQFNWYVDGVEVHNAKTKPREEQFNSTYRVVSVLTVLHQDWLNGKEYKCKVSNKGLPSSIEKTISKAKGQPREPQVYTLPPSQEEMTKNQVSLTCLVKGFYPSDIAVEWESNGQPENNYKTTPPVLDSDGSFFLYSRLTVDKSRWQEGNVFSCSVMHEALHNHYTQKSLSLSLG

SEQ ID NO: 1901 - protein, 243 aa, synthetic construct
  REGION 1..243: note = Synagis-hIgG4(S228P) HC aa sequence w/o ss
NVDHKPSNTKVDKRVESKYGPPCPPCPAPEFLGGPSVFLFPPKPKDTLMISRTPEVTCVVVDVSQEDPEVQFNWYVDGVEVHNAKTKPREEQFNSTYRVVSVLTVLHQDWLNGKEYKCKVSNKGLPSSIEKTISKAKGQPREPQVYTLPPSQEEMTKNQVSLTCLVKGFYPSDIAVEWESNGQPENNYKTTPPVLDSDGSFFLYSRLTVDKSRWQEGNVFSCSVMHEALHNHYTQKSLSLSLG

SEQ ID NO: 1902 - skipped

SEQ ID NO: 1903 - protein, 233 aa, synthetic construct
  REGION 1..233: note = Synagis-hIgG4(S228P) LC aa sequence
METDTLLLWVLLLWVPGSTGDIQMTQSPSTLSASVGDRVTITCKCQLSVGYMHWYQQKPGKAPKLLIYDTSKLASGVPSRFSGSGSGTEFTLTISSLQPDDFATYYCFQGSGYPFTFGGGTKLEIKRTVAAPSVFIFPPSDEQLKSGTASVVCLLNNFYPREAKVQWKVDNALQSGNSQESVTEQDSKDSTYSLSSTLTLSKADYEKHKVYACEVTHQGLSSPVTKSFNRGEC

SEQ ID NO: 1904 - protein, 213 aa, synthetic construct
  REGION 1..213: note = Synagis-hIgG4(S228P) LC aa sequence w/o ss
DIQMTQSPSTLSASVGDRVTITCKCQLSVGYMHWYQQKPGKAPKLLIYDTSKLASGVPSRFSGSGSGTEFTLTISSLQPDDFATYYCFQGSGYPFTFGGGTKLEIKRTVAAPSVFIFPPSDEQLKSGTASVVCLLNNFYPREAKVQWKVDNALQSGNSQESVTEQDSKDSTYSLSSTLTLSKADYEKHKVYACEVTHQGLSSPVTKSFNRGEC

SEQ ID NO: 1905 - protein, 10 aa, synthetic construct
  REGION 1..10: note = Synagis-hIgG4(S228P) cdrh1Sequence
GFSLSTSGMS

SEQ ID NO: 1906 - protein, 7 aa, synthetic construct
  REGION 1..7: note = Synagis-hIgG4(S228P) cdrh2Sequence
IWWDDKK

SEQ ID NO: 1907 - protein, 12 aa, synthetic construct
  REGION 1..12: note = Synagis-hIgG4(S228P) cdrh3Sequence
ARSMITNWYFDV

SEQ ID NO: 1908 - protein, 5 aa, synthetic construct
  REGION 1..5: note = Synagis-hIgG4(S228P) cdrl1Sequence
LSVGY

SEQ ID NO: 1909 - skipped

SEQ ID NO: 1910 - protein, 9 aa, synthetic construct
  REGION 1..9: note = Synagis-hIgG4(S228P) cdrl3Sequence
FQGSGYPFT

SEQ ID NO: 1911 - protein, 120 aa, synthetic construct
  REGION 1..120: note = Synagis-hIgG4(S228P) VH
QVTLRESGPALVKPTQTLTLTCTFSGFSLSTSGMSVGWIRQPPGKALEWLADIWWDDKKDYNPSLKSRLTISKDTSKNQVVLKVTNMDPADTATYYCARSMITNWYFDVWGAGTTVTVSS

SEQ ID NO: 1912 - protein, 106 aa, synthetic construct
  REGION 1..106: note = Synagis-hIgG4(S228P) VL
DIQMTQSPSTLSASVGDRVTITCKCQLSVGYMHWYQQKPGKAPKLLIYDTSKLASGVPSRFSGSGSGTEFTLTISSLQPDDFATYYCFQGSGYPFTFGGGTKLEIK

SEQ ID NO: 1913 - protein, 119 aa, synthetic construct; identical to SEQ ID NO: 332
  REGION 1..119: note = IMT001-4-HCLC (TB001) VH Sequence

SEQ ID NO: 1914 - DNA, 702 bp, synthetic construct
  misc_feature 1..702: note = Synagis-hIgG4(S228P) LC nt sequence
  source 1..702: mol_type = other DNA
atggaaaccgacaccctgctgctctgggtgctgctgctctgggtgcccggctccaccggagatattcaaatgactcagtctcccagcaccctctctgccagcgtgggtgaccgtgttactattacctgtaaatgccagctcagtgtaggctacatgcactggtaccaacagaaaccagggaaggctcctaagttgctgatatacgacacctcaaagctggcatccggggtgccatccaggtttagcggcagcggctccggtacagagttcacactcaccatctcatcattgcagcccgacgatttcgctacttactattgcttccagggttcaggatatccttttacattcggcggaggaaccaagctggaaattaaacggaccgtggccgcccccagcgtgttcatcttccctcccagcgacgagcagctgaagtctggcaccgccagcgtggtgtgcctgctgaacaacttctacccccgcgaggccaaggtgcagtggaaggtggacaacgccctgcagagcggcaacagccaggagagcgtgaccgagcaggactccaaggacagcacctacagcctgagcagcaccctgaccctgagcaaggccgactacgagaagcacaaggtgtacgcctgcgaggtgacccaccagggactgtctagccccgtgaccaagagcttcaaccggggcgagtgctaa
